(19) United States
(12) Patent Application Publication
(10) Pub. No.: US 2026/0097121 A1
(43) Pub. Date: Apr. 9, 2026

(54) Biallelic Knockout of CISH

(71) Applicant: EmendoBio Inc., Wimington, DE (US)

(72) Inventor: Rafi EMMANUEL, Ramla (IL)

(21) Appl. No.: 19/113,098

(22) PCT Filed: Sep. 18, 2023
(86) PCT No.: PCT/US2023/074470

§ 371 Date: Mar. 19, 2025

Related U.S. Application Data
(60) Provisional application No. 63/376,272, filed on Sep. 19, 2022.

(51) Int. Cl. A61K 40/34; A61K 40/11; C12N 9/22; C12N 15/11; C12N 15/90

(52) U.S. Cl. CPC A61K 40/34; A61K 40/11; C12N 9/226; C12N 15/11; C12N 15/907; C12N 2310/20

(57) ABSTRACT

Compositions comprising an RNA molecule comprising a guide sequence portion having 17-50 contiguous nucleotides containing nucleotides in the sequence set forth in any one of SEQ ID NOs: 1-6838 and methods and uses thereof.

[0001] This application is a Section 371 national stage of PCT International Application No. PCT/US2023/074470, filed Sep. 18, 2023, and claims the benefit of U.S. Provisional Application No. 63/376,272 filed Sep. 19, 2022, the content of which is hereby incorporated by reference.

[0002] Throughout this application, various publications are referenced, including referenced in parenthesis. The disclosures of all publications mentioned in this application in their entireties are hereby incorporated by reference into this application in order to provide additional description of the art to which this invention pertains and of the features in the art which can be employed with this invention.

### REFERENCE TO SEQUENCE LISTING

[0003] This application incorporates-by-reference nucleotide sequences which are present in the file named “230918_92041-A-PCT_Sequence_Listing_AWG.xml”, which is 5,917 kilobytes in size, and which was created on Sep. 17, 2023 in the IBM-PC machine format, having an operating system compatibility with MS-Windows, which is contained in the XML file filed Mar. 19, 2025 as part of this application.

### BACKGROUND OF INVENTION

[0004] Chimeric antigen receptors (CAR) provide a promising approach for immunotherapy. However, to make such therapies (e.g., CAR-T cell therapies) more accessible, it is highly desirable to develop an allogeneic adoptive transfer strategy in which universal CAR cells derived from cells of healthy donors can be applied to treat multiple patients. In order to implement such a strategy, the immunogenicity and reactivity of CAR-T cells must be optimized to avoid harmful reactions, such as rejection by the host or graft-versus-host-disease.

### SUMMARY OF THE INVENTION

[0005] Cytokine Inducible SH2 Containing Protein (CISH) belongs to the cytokine-induced STAT inhibitor (CIS) family, which contains cytokine-inducible negative regulators of cytokine signaling. Disclosed are approaches for knocking out the CISH gene in cells to be utilized for immunotherapy approaches, such as CAR-T therapy. A cell modified to have a CISH knockout improves performance of the cell in allogeneic adoptive transfer therapy. Such cells have improved activity, retention, and/or expansion qualities for use in adoptive cancer immunotherapy.

[0006] The present disclosure also provides a method for inactivating alleles of the Cytokine Inducible SH2 Containing Protein (CISH) gene in a cell, the method comprising
[0007] introducing to the cell a composition comprising:
   [0008] a CRISPR nuclease, or a polynucleotide molecule encoding the CRISPR nuclease; and
   [0009] an RNA molecule comprising a guide sequence portion having 17-50 nucleotides, or a polynucleotide molecule encoding the RNA molecule,
[0010] wherein a complex of the CRISPR nuclease and the RNA molecule affects a double strand break in the allele of the CISH gene.

[0011] In some embodiments, the RNA molecule comprises a guide sequence portion that targets a sequence that is located within any one of Exons 1-3 or Intron 2 of the CISH gene, or a sequence that is located within a genomic range selected from any one of 3:50611599-50611805, 3:50608341-50608624, 3:50607575-50608173, and 3:50608112-50608403. In some embodiments, the guide sequence portion of the RNA molecule comprises 17-50 contiguous nucleotides containing nucleotides in the sequence set forth in any one of SEQ ID NOs: 1-6838.

[0012] According to embodiments of the present invention, there is provided an RNA molecule comprising a guide sequence portion having 17-50 contiguous nucleotides containing nucleotides in the sequence set forth in any one of SEQ ID Nos: 1-6838.

[0013] According to embodiments of the present invention, there is provided a composition comprising an RNA molecule comprising a guide sequence portion having 17-50 contiguous nucleotides containing nucleotides in the sequence set forth in any one of SEQ ID NOs: 1-6838 and a CRISPR nuclease.

[0014] According to embodiments of the present invention, there is provided a method for inactivating a CISH allele in a cell, the method comprising delivering to the cell a composition comprising an RNA molecule comprising a guide sequence portion having 17-50 contiguous nucleotides containing nucleotides in the sequence set forth in any one of SEQ ID NOs: 1-6838 and a CRISPR nuclease. In some embodiments, the cell is a lymphocyte. In some embodiments, the cell is a T cell. In some embodiments, the cell is a T regulatory cell. In some embodiments, the cell is a B cell. In some embodiments, the cell is a natural killer (NK) cell. In some embodiments, the cell is a macrophage. In some embodiments, the cell is a stem cell. In some embodiments, the cell is an iPSC. In some embodiments, the cell is a fibroblast, blood cell, hepatocyte, keratinocyte, or any other cell type capable of being reprogrammed to an induced pluripotent stem cell (iPSC). In some embodiments, the delivering to the cell is performed in vivo, ex vivo, or in vitro. In some embodiments, the method is performed ex vivo and the cell is provided/explanted from an individual patient. In some embodiments, the method further comprises the step of introducing the resulting cell, with the modified/knocked out CISH allele, into an individual patient. In some embodiments, the cell is originated from the individual patient to be treated. In some embodiments, the cell is originated from a donor. In some embodiments, the cell is allogeneic to the individual patient to which it is introduced.

[0015] According to embodiments of the present invention, there is provided a method for improving the activity and/or retention and/or expansion of a cell for adoptive cell therapy, the method comprising delivering to a cell of a subject in need of the adoptive cell therapy a composition comprising an RNA molecule comprising a guide sequence portion having 17-50 contiguous nucleotides containing nucleotides in the sequence set forth in any one of SEQ ID NOS: 1-6838 and a CRISPR nuclease. In some embodiments, the method is for increasing persistence and/or engraftment of a cell in a host subject, the method comprising delivering to the cell a composition comprising an RNA molecule comprising a guide sequence portion having 17-50 contiguous nucleotides containing nucleotides in the sequence set forth in any one of SEQ ID NOS: 1-6838 and a CRISPR nuclease; and introducing the cell to the host subject. In some embodiments, the cell is further differentiated prior to introducing the cell to the host subject. In some embodiments, the cell is further engineered to express a chimeric antigen receptor. In some embodiments, the cell is a stem cell, an iPSC, or a progenitor cell and is differentiated to a T cell prior to introducing the cell to the host subject. In some embodiments, the cell is a T cell. In some embodiments, the cell is further engineered to have additional genes inactivated and/or knocked-out in order to improve the use of the cell for adoptive transfer, e.g. knockout of additional genes to avoid graft-versus-host disease (GVHD) following introduction of the cell into a host subject.

[0016] According to embodiments of the present invention, there is provided use of a composition comprising an RNA molecule comprising a guide sequence portion having 17-50 contiguous nucleotides containing nucleotides in the sequence set forth in any one of SEQ ID NOs: 1-6838 and a CRISPR nuclease for inactivating a CISH allele in a cell, comprising delivering to the cell the composition comprising an RNA molecule comprising a guide sequence portion having 17-50 contiguous nucleotides containing nucleotides in the sequence set forth in any one of SEQ ID NOS: 1-6838 and a CRISPR nuclease.

[0017] According to embodiments of the present invention, there is provided a medicament comprising an RNA molecule comprising a guide sequence portion having 17-50 contiguous nucleotides containing nucleotides in the sequence set forth in any one of SEQ ID NOs: 1-6838 and a CRISPR nuclease for use in inactivating a CISH allele in a cell, wherein the medicament is administered by delivering to the cell the composition comprising an RNA molecule comprising a guide sequence portion having 17-50 contiguous nucleotides containing nucleotides in the sequence set forth in any one of SEQ ID NOs: 1-6838 and a CRISPR nuclease.

[0018] According to embodiments of the present invention, there is provided use of a composition comprising an RNA molecule comprising a guide sequence portion having 17-50 contiguous nucleotides containing nucleotides in the sequence set forth in any one of SEQ ID NOs: 1-6838 and a CRISPR nuclease for improving the activity and/or retention and/or expansion of a cell for adoptive cell therapy or increasing persistence of the cell upon engraftment, comprising delivering to a cell of a subject in need of the adoptive cell therapy the composition of comprising an RNA molecule comprising a guide sequence portion having 17-50 contiguous nucleotides containing nucleotides in the sequence set forth in any one of SEQ ID NOs: 1-6838 and a CRISPR nuclease.

[0019] According to embodiments of the present invention, there is provided a method of treating a disease or disorder, the method comprising delivering any one of the compositions or the modified cells described herein to the subject, preferably wherein the disease or disorder is cancer.

[0020] According to embodiments of the present invention, there is provided a kit for inactivating a CISH allele in a cell, comprising an RNA molecule comprising a guide sequence portion having 17-50 contiguous nucleotides containing nucleotides in the sequence set forth in any one of SEQ ID NOs: 1-6838, a CRISPR nuclease, and optionally a tracrRNA molecule; and instructions for delivering the RNA molecule; CRISPR nuclease, and optionally the tracrRNA to the cell.

### BRIEF DESCRIPTION OF THE DRAWINGS

[0021] FIG. 1: CISH editing in HeLa cells. OMNI-103 CRISPR nuclease was expressed in a mammalian cell system (HeLa cells) by DNA transfection, together with an sgRNA-expressing plasmid. Transfection efficiency (% transfection) was determined by flow cytometry measurement of mCherry signal. All tests were done in triplicate. ‘OMNI nuclease only’ (i.e. no guide) transfected cells served as a negative control, and no editing was observed in those cells (data not shown).

[0022] FIGS. 2A-2B: CISH editing in primary T cells. T cells obtained a donor were thawed and activated with beads for 72 h. Then, a cleavage activity assay was performed with OMNI-103 CRISPR nuclease (113 pmol)+sgRNA (226 pmol) and 2×10⁶ cells per treatment. After seven (7) days, genomic DNA was isolated from ˜100,000 cells and RNA was isolated from ˜1,000,000 cells. Robotic PCR on DNA lysate from Quick Extract was used to prepare next-generation sequencing (NGS) samples for analysis. (FIG. 2A). CISH RNA expression was examined by qPCR (FIG. 2B).

### DETAILED DESCRIPTION

[0023] Unless otherwise defined, all technical and/or scientific terms used herein have the same meaning as commonly understood by one of ordinary skill in the art to which the invention pertains. Although methods and materials similar or equivalent to those described herein can be used in the practice or testing of embodiments of the invention, exemplary methods and/or materials are described below. In case of conflict, the patent specification, including definitions, will control. In addition, the materials, methods, and examples are illustrative only and are not intended to be necessarily limiting.

[0024] It should be understood that the terms “a” and “an” as used above and elsewhere herein refer to “one or more” of the enumerated components. It will be clear to one of ordinary skill in the art that the use of the singular includes the plural unless specifically stated otherwise. Therefore, the terms “a,” “an” and “at least one” are used interchangeably in this application.

[0025] For purposes of better understanding the present teachings and in no way limiting the scope of the teachings, unless otherwise indicated, all numbers expressing quantities, percentages or proportions, and other numerical values used in the specification and claims, are to be understood as being modified in all instances by the term “about.” Accordingly, unless indicated to the contrary, the numerical parameters set forth in the following specification and attached claims are approximations that may vary depending upon the desired properties sought to be obtained. At the very least, each numerical parameter should at least be construed in light of the number of reported significant digits and by applying ordinary rounding techniques.

[0026] Unless otherwise stated, adjectives such as “substantially” and “about” modifying a condition or relationship characteristic of a feature or features of an embodiment of the invention, are understood to mean that the condition or characteristic is defined to within tolerances that are acceptable for operation of the embodiment for an application for which it is intended. Unless otherwise indicated, the word “or” in the specification and claims is considered to be the inclusive “or” rather than the exclusive or, and indicates at least one of, or any combination of items it conjoins.

[0027] In the description and claims of the present application, each of the verbs, “comprise,” “include” and “have” and conjugates thereof, are used to indicate that the object or objects of the verb are not necessarily a complete listing of components, elements or parts of the subject or subjects of the verb. Other terms as used herein are meant to be defined by their well-known meanings in the art.

[0028] In some embodiments of the present invention, a DNA nuclease is utilized to affect a DNA break at a target site to induce cellular repair mechanisms, for example, but not limited to, non-homologous end-joining (NHEJ). During classical NHEJ, two ends of a double-strand break (DSB) site are ligated together in a fast but also inaccurate manner (i.e. frequently resulting in mutation of the DNA at the cleavage site in the form of small insertion or deletions).

[0029] As used herein, the term “modified cells” refers to cells in which a double strand break is affected by a complex of an RNA molecule and the CRISPR nuclease as a result of hybridization with the target sequence, i.e. on-target hybridization.

[0030] This invention provides a modified cell or cells obtained by use of any of the methods described herein. In an embodiment these modified cell or cells are capable of giving rise to progeny cells. In an embodiment these modified cell or cells are capable of giving rise to progeny cells after engraftment. As a non-limiting example, the modified cells may be hematopoietic stem cells (HSCs), or any cell suitable for an allogenic cell transplant or autologous cell transplant.

[0031] As used herein, the term “targeting sequence” or “targeting molecule” refers a nucleotide sequence or molecule comprising a nucleotide sequence that is capable of hybridizing to a specific target sequence, e.g., the targeting sequence has a nucleotide sequence which is at least partially complementary to the sequence being targeted along the length of the targeting sequence. The targeting sequence or targeting molecule may be part of an RNA molecule that can form a complex with a CRISPR nuclease, either alone or in combination with other RNA molecules, with the targeting sequence serving as the targeting portion of the CRISPR complex. When the molecule having the targeting sequence is present contemporaneously with the CRISPR nuclease, the RNA molecule, alone or in combination with an additional one or more RNA molecules (e.g. a tracrRNA molecule), is capable of targeting the CRISPR nuclease to the specific target sequence. As non-limiting example, a guide sequence portion of a CRISPR RNA molecule or single-guide RNA molecule may serve as a targeting molecule. Each possibility represents a separate embodiment. A targeting sequence can be custom designed to target any desired sequence.

[0032] The term “targets” as used herein, refers to preferentially hybridizing a targeting sequence of a targeting molecule to a nucleic acid having a targeted nucleotide sequence. It is understood that the term “targets” encompasses variable hybridization efficiencies, such that there is preferential targeting of the nucleic acid having the targeted nucleotide sequence, but unintentional off-target hybridization in addition to on-target hybridization might also occur. It is understood that where an RNA molecule targets a sequence, a complex of the RNA molecule and a CRISPR nuclease molecule targets the sequence for nuclease activity.

[0033] The “guide sequence portion” of an RNA molecule refers to a nucleotide sequence that is capable of hybridizing to a specific target DNA sequence, e.g., the guide sequence portion has a nucleotide sequence which is partially or fully complementary to the DNA sequence being targeted along the length of the guide sequence portion. In some embodiments, the guide sequence portion is 17, 18, 19, 20, 21, 22, 23, 24, 25, 26, 27, 28, 29, 30, 31, 32, 33, 34, 35, 36, 37, 38, 39, 40, 41, 42, 43, 44, 45, 46, 47, 48, 49 or 50 nucleotides in length, or approximately 17-50, 17-49, 17-48, 17-47, 17-46, 17-45, 17-44, 17-43, 17-42, 17-41, 17-40, 17-39, 17-38, 17-37, 17-36, 17-35, 17-34, 17-33, 17-31, 17-50, 17-29, 17-28, 17-27, 17-26, 17-25, 17-24, 17-22, 17-21, 18-25, 18-24, 18-23, 18-22, 18-21, 19-25, 19-24, 19-23, 19-22, 19-21, 19-20, 20-22, 18-20, 20-21, 21-22, or 17-20 nucleotides in length. Preferably, the entire length of the guide sequence portion is fully complementary to the DNA sequence being targeted along the length of the guide sequence portion. The guide sequence portion may be part of an RNA molecule that can form a complex with a CRISPR nuclease with the guide sequence portion serving as the DNA targeting portion of the CRISPR complex. When the RNA molecule having the guide sequence portion is present contemporaneously with the CRISPR molecule, alone or in combination with an additional one or more RNA molecules (e.g. a tracrRNA molecule), the RNA molecule is capable of targeting the CRISPR nuclease to the specific target DNA sequence. Accordingly, a CRISPR complex can be formed by direct binding of the RNA molecule having the guide sequence portion to a CRISPR nuclease or by binding of the RNA molecule having the guide sequence portion and an additional one or more RNA molecules to the CRISPR nuclease. Each possibility represents a separate embodiment. A guide sequence portion can be custom designed to target any desired sequence. Accordingly, a molecule comprising a “guide sequence portion” is a type of targeting molecule. In some embodiments, the guide sequence portion comprises a sequence that is the same as, or differs by no more than 1, 2, 3, 4, or 5 nucleotides from, a guide sequence portion described herein, e.g., a guide sequence set forth in any of SEQ ID NOs: 1-6838. Each possibility represents a separate embodiment. In some of these embodiments, the guide sequence portion comprises a sequence that is the same as a sequence set forth in any of SEQ ID NOs: 1-6838. Throughout this application, the terms “guide molecule,” “RNA guide molecule,” “guide RNA molecule,” and “gRNA molecule” are synonymous with a molecule comprising a guide sequence portion.

[0034] The term “non-discriminatory” as used herein refers to a guide sequence portion of an RNA molecule that targets a specific DNA sequence that is common to all alleles of a gene.

[0035] In embodiments of the present invention, an RNA molecule comprises a guide sequence portion having 17-50 contiguous nucleotides containing nucleotides in the sequence set forth in any one of SEQ ID NOs: 1-6838.

[0036] The RNA molecule and/or the guide sequence portion of the RNA molecule may contain modified nucleotides. Exemplary modifications to nucleotides/polynucleotides may be synthetic and encompass polynucleotides which contain nucleotides comprising bases other than the naturally occurring adenine, cytosine, thymine, uracil, or guanine bases. Modifications to polynucleotides include polynucleotides which contain synthetic, non-naturally occurring nucleosides e.g., locked nucleic acids. Modifications to polynucleotides may be utilized to increase or decrease stability of an RNA. An example of a modified polynucleotide is an mRNA containing 1-methyl pseudo-uridine. For examples of modified polynucleotides and their uses, see U.S. Pat. No. 8,278,036, PCT International Publication No. WO/2015/006747, and Weissman and Kariko (2015), each of which is hereby incorporated by reference.

[0037] As used herein, “contiguous nucleotides” set forth in a SEQ ID NO refers to nucleotides in a sequence of nucleotides in the order set forth in the SEQ ID NO without any intervening nucleotides.

[0038] In embodiments of the present invention, the guide sequence portion may be 17-50 nucleotides in length and contain 20-22 contiguous nucleotides in the sequence set forth in any one of SEQ ID NOs: 1-6838. In embodiments of the present invention, the guide sequence portion may be less than 22 nucleotides in length. For example, in embodiments of the present invention the guide sequence portion may be 17, 18, 19, 20, or 21 nucleotides in length. In such embodiments the guide sequence portion may consist of 17, 18, 19, 20, or 21 nucleotides, respectively, in the sequence of 17-22 contiguous nucleotides set forth in any one of SEQ ID NOs: 1-6838. For example, a guide sequence portion having 17 nucleotides in the sequence of 17 contiguous nucleotides set forth in SEQ ID NO: 6834 may consist of any one of the following nucleotide sequences (nucleotides excluded from the contiguous sequence are marked in strike-through):

(SEQ ID NO: 6834)
AAAAAAAUGUACUUGGUUCC
17 nucleotide guide sequence 1:
(SEQ ID NO: 6835) [symbol]
AAAAUGUACUUGGUUCC
17 nucleotide guide sequence 2:
(SEQ ID NO: 6836) [symbol]
AAAAAUGUACUUGGUUC [symbol]
17 nucleotide guide sequence 3:
(SEQ ID NO: 6837) [symbol]
AAAAAAUGUACUUGGUU [symbol]
17 nucleotide guide sequence 4:
(SEQ ID NO: 6838)
AAAAAAAUGUACUUGGU

[symbol]

[0039] In embodiments of the present invention, the guide sequence portion may be greater than 20 nucleotides in length. For example, in embodiments of the present invention the guide sequence portion may be 21, 22, 23, 24, 25, 26, 27, 28, 29, or 30 nucleotides in length. In such embodiments the guide sequence portion comprises 17-50 nucleotides containing the sequence of 20, 21 or 22 contiguous nucleotides set forth in any one of SEQ ID NOs: 1-6838 and additional nucleotides fully complimentary to a nucleotide or sequence of nucleotides adjacent to the 3′ end of the target sequence, 5′ end of the target sequence, or both.

[0040] In embodiments of the present invention, a CRISPR nuclease and an RNA molecule comprising a guide sequence portion form a CRISPR complex that binds to a target DNA sequence to effect cleavage of the target DNA sequence. CRISPR nucleases, e.g. Cpf1, may form a CRISPR complex comprising a CRISPR nuclease and RNA molecule without a further tracrRNA molecule. Alternatively, CRISPR nucleases, e.g. Cas9, may form a CRISPR complex between the CRISPR nuclease, an RNA molecule, and a tracrRNA molecule. A guide sequence portion, which comprises a nucleotide sequence that is capable of hybridizing to a specific target DNA sequence, and a sequence portion that participates in CRIPSR nuclease binding, e.g. a tracrRNA sequence portion, can be located on the same RNA molecule. Alternatively, a guide sequence portion may be located on one RNA molecule and a sequence portion that participates in CRIPSR nuclease binding, e.g. a tracrRNA portion, may located on a separate RNA molecule. A single RNA molecule comprising a guide sequence portion (e.g. a DNA-targeting RNA sequence) and at least one CRISPR protein-binding RNA sequence portion (e.g. a tracrRNA sequence portion), can form a complex with a CRISPR nuclease and serve as the DNA-targeting molecule. In some embodiments, a first RNA molecule (e.g. a crRNA molecule) comprising a DNA-targeting RNA portion which includes a guide sequence portion and a separate RNA molecule (e.g. a tracrRNA molecule) comprising a CRISPR protein-binding RNA sequence interact by base pairing to form an RNA complex (e.g. a crRNA:tracrRNA complex) that targets the CRISPR nuclease to a DNA target site or, alternatively, are fused together to form an RNA molecule (e.g. a sgRNA molecule) that complexes with the CRISPR nuclease and targets the CRISPR nuclease to a DNA target site.

[0041] In embodiments of the present invention, an RNA molecule comprising a guide sequence portion may further comprise the sequence of a tracrRNA molecule. Such embodiments may be designed as a synthetic fusion of the guide portion of the RNA molecule and the trans-activating crRNA (tracrRNA). (See Jinek et al., 2012). In such an embodiment, the RNA molecule is a single guide RNA (sgRNA) molecule. Embodiments of the present invention may also form CRISPR complexes utilizing a separate tracrRNA molecule and a separate RNA molecule comprising a guide sequence portion (e.g. a crRNA molecule). In such embodiments the tracrRNA molecule may hybridize with the RNA molecule via basepairing and may be advantageous in certain applications of the invention described herein.

[0042] The term “tracr mate sequence” refers to a sequence sufficiently complementary to a tracrRNA molecule so as to hybridize to the tracrRNA via basepairing and promote the formation of a CRISPR complex. (See U.S. Pat. No. 8,906,616). In embodiments of the present invention, the RNA molecule may further comprise a portion having a tracr mate sequence.

[0043] A “gene,” for the purposes of the present disclosure, includes a DNA region encoding a gene product, as well as all DNA regions which regulate the production of the gene product, whether or not such regulatory sequences are adjacent to coding and/or transcribed sequences. Accordingly, a gene includes, but is not necessarily limited to, promoter sequences, terminators, translational regulatory sequences such as ribosome binding sites and internal ribosome entry sites, enhancers, silencers, insulators, boundary elements, replication origins, matrix attachment sites and locus control regions.

[0044] “Eukaryotic” cells include, but are not limited to, fungal cells (such as yeast), plant cells, animal cells, mammalian cells and human cells.

[0045] The term “nuclease” as used herein refers to an enzyme capable of cleaving the phosphodiester bonds between the nucleotide subunits of nucleic acid. A nuclease may be isolated or derived from a natural source. The natural source may be any living organism. Alternatively, a nuclease may be a modified or a synthetic protein which retains the phosphodiester bond cleaving activity. Gene modification can be achieved using a nuclease, for example a CRISPR nuclease.

[0046] According to embodiments of the present invention, there is provided a method for inactivating alleles of the Cytokine Inducible SH2 Containing Protein (CISH) gene in a cell, the method comprising
[0047] introducing to the cell a composition comprising:
   [0048] at least one CRISPR nuclease, or a polynucleotide molecule encoding a CRISPR nuclease; and
   [0049] an RNA molecule comprising a guide sequence portion, or a polynucleotide molecule encoding the same,
[0050] wherein a complex of the CRISPR nuclease and the RNA molecule affects a double strand break in alleles of the CISH gene, and
[0051] wherein the guide sequence portion of the RNA molecule comprises 17-50 contiguous nucleotides containing nucleotides in the sequence set forth in any one of SEQ ID NOs: 1-6838.

[0052] In some embodiments, the guide sequence portion contains a sequence of nucleotides as listed in SEQ ID NOs: 1-6838, or a portion of any one of SEQ ID NOs: 1-6838, and optionally contains additional nucleotides prepended or appended to the beginning or end of the sequence of nucleotides. As a non-limiting example, a 17-nucleotide sequence found within SEQ ID NO: 1 may form a guide sequence portion. Additionally, a guide sequence portion may comprise a 17-nucleotide sequence found within SEQ ID NO: 1 and further include additional nucleotides 5′ or 3′ of the 17-nucleotide sequence found within SEQ ID NO: 1.

[0053] In some embodiments, the RNA molecule is a crRNA molecule and the composition further comprises a tracrRNA molecule that forms a crRNA:tracrRNA complex with the crRNA molecule. In some embodiments, the RNA molecule is an sgRNA molecule.

[0054] In some embodiments, the composition comprises additional RNA molecules comprising a guide sequence portion comprising 17-50 contiguous nucleotides containing nucleotides in the sequence set forth in any one of SEQ ID NOs: 1-6838.

[0055] In some embodiments, the guide sequence portion of the RNA molecule comprises 17-50 contiguous nucleotides containing nucleotides in the sequence set forth in any one of SEQ ID NOs: 1-6838 modified to comprise up to five mismatches relative to the target site.

[0056] In some embodiments, the method is a method of preparing modified immune cells (e.g., T cells) for use in immunotherapy. In some embodiments, the method is performed in vitro or ex vivo.

[0057] In some embodiments, the composition is introduced to a cell in a subject or to a cell in culture.

[0058] In some embodiments, the cell is a lymphocyte, a T cell, a T regulatory cell, a B cell, a natural killer (NK) cell, a macrophage, a stem cell, or a fibroblast, blood cell, hepatocyte, keratinocyte, or any other cell type capable of being reprogrammed to an induced pluripotent stem cell (iPSC).

[0059] In some embodiments, the cell is a hematopoietic stem cell (HSC), induced pluripotent stem cell (iPS cell), iPSc-derived cell, natural killer cell (NK), iPS-derived NK cell (INK), T cell, innate-like T cell (iT), natural killer T cell (NKT), γδ T cell, iPSc-derived T cell, invariant NKT cells (iNKT), iPSc-derived NKT, monocyte, or macrophage.

[0060] In some embodiments, the CRISPR nuclease and the RNA molecule are introduced to the cell at substantially the same time or at different times.

[0061] In some embodiments, alleles of the CISH gene in the cell are subjected to an insertion or deletion mutation.

[0062] In some embodiments, the insertion or deletion mutation creates an early stop codon.

[0063] In some embodiments, the inactivating results in a truncated protein encoded by the mutated allele. For example, the method of inactivating mutates a CISH allele such that the mutated allele encodes a truncated form of a CISH protein.

[0064] In some embodiments, the composition introduced to the cell further comprises a second RNA molecule comprising a guide sequence portion, wherein the guide sequence portion of the second RNA molecule comprises 17-50 contiguous nucleotides containing nucleotides in the sequence set forth in any one of SEQ ID NOs: 1-6838, preferably wherein the guide sequence portion of the second RNA molecule differs from the guide sequence portion of the first RNA molecule.

[0065] According to embodiments of the present invention, there is provided a method for inactivating alleles of the Cytokine Inducible SH2 Containing Protein (CISH) gene in a cell, the method comprising
[0066] introducing to the cell a composition comprising:
   [0067] at least one CRISPR nuclease, or a polynucleotide molecule encoding a CRISPR nuclease; and
   [0068] an RNA molecule comprising a guide sequence portion, or a polynucleotide molecule encoding the RNA molecule,
[0069] wherein a complex of the CRISPR nuclease and the RNA molecule affects a double strand break in alleles of the CISH gene,
[0070] wherein the guide sequence portion of the RNA molecule comprises 17-50 contiguous nucleotides containing nucleotides in the sequence set forth in any one of SEQ ID NOs: 1-6838 modified to contain 1, 2, 3, 4, or 5 nucleotide mismatches relative to a fully-complementary target sequence of the guide sequence portion.

[0071] In some embodiments, the guide sequence portion of the RNA molecule comprises 1, 2, 3, 4, or 5 nucleotide mismatches relative to a fully-complementary target sequence of the guide sequence portion.

[0072] In some embodiments, the guide sequence portion provides higher targeting specificity to the complex of the CRISPR nuclease and the RNA molecule relative to a guide sequence portion that has higher complementarity to an allele of the CISH gene.

[0073] In some embodiments, the composition introduced to the cell further comprises a second RNA molecule comprising a guide sequence portion, wherein the guide sequence portion of the second RNA molecule comprises 17-50 contiguous nucleotides containing nucleotides in the sequence set forth in any one of SEQ ID NOs: 1-6838, or any one of SEQ ID NOs: 1-6838 modified to contain 1, 2, 3, 4, or 5 nucleotide mismatches relative to a fully-complementary target sequence of the guide sequence portion, preferably wherein the guide sequence portion of the second RNA molecule differs from the guide sequence portion of the first RNA molecule.

[0074] According to embodiments of the present invention, there is provided a composition comprising an RNA molecule which comprises a guide sequence portion comprising 17-50 contiguous nucleotides containing nucleotides in the sequence set forth in any one of SEQ ID NOS: 1-6838.

[0075] In some embodiments, the composition further comprises a second RNA molecule which comprises a guide sequence portion comprising 17-50 contiguous nucleotides containing nucleotides in the sequence set forth in any one of SEQ ID NOs: 1-6838, preferably wherein the guide sequence portion of the second RNA molecule differs from the guide sequence portion of the first RNA molecule.

[0076] According to embodiments of the present invention, there is provided a composition comprising an RNA molecule which comprises a guide sequence portion comprising 17-50 contiguous nucleotides containing nucleotides in the sequence set forth in any one of SEQ ID NOS: 1-6838, or any one of SEQ ID NOs: 1-6838 modified to contain 1, 2, 3, 4, or 5 nucleotide mismatches relative to a fully-complementary target sequence of the guide sequence portion.

[0077] In some embodiments, the composition further comprises a second RNA molecule which comprises a guide sequence portion comprising 17-50 contiguous nucleotides containing nucleotides in the sequence set forth in any one of SEQ ID NOs: 1-6838, or any one of SEQ ID NOs: 1-6838 modified to contain 1, 2, 3, 4, or 5 nucleotide mismatches relative to a fully-complementary target sequence of the guide sequence portion, preferably wherein the guide sequence portion of the second RNA molecule differs from the guide sequence portion of the first RNA molecule.

[0078] In some embodiments, any one of the compositions described herein further comprises a CRISPR nuclease.

[0079] In some embodiments, any one of the compositions described herein further comprises a tracrRNA molecule.

[0080] According to embodiments of the present invention, there is provided a cell modified by any one of the methods described herein or modified using the any one of the compositions described herein. The modified cell may also have additional genes altered in order to improve their use for adoptive transfer, for example, reducing or preventing graft-versus-host disease (GVHD).

[0081] Preferably all alleles of the CISH gene are inactivated such that the modified cell cannot express a full-length, functional CISH protein product.

[0082] In some embodiments, the cell is any one of a wherein the cell is a lymphocyte, a T cell, a T regulatory cell, a B cell, a natural killer (NK) cell, a macrophage, a stem cell, or a fibroblast, blood cell, hepatocyte, keratinocyte, or any other cell type capable of being reprogrammed to an induced pluripotent stem cell (iPSC).

[0083] In some embodiments, the cell is a hematopoietic stem cell (HSC), induced pluripotent stem cell (iPS cell), iPSc-derived cell, natural killer cell (NK), iPS-derived NK cell (INK), T cell, innate-like T cell (iT), natural killer T cell (NKT), γδ T cell, iPSc-derived T cell, invariant NKT cell (INKT), iPSc-derived NKT, monocyte, or macrophage.

[0084] In some embodiments, the cell is a stem cell or any cell type capable of being reprogrammed to an induced pluripotent stem cell (iPSC).

[0085] In some embodiments, the stem cell is differentiated after it is modified.

[0086] In some embodiments, the stem cell is differentiated into any one of a lymphocyte, a T cell, a T regulatory cell, a B cell, a natural killer (NK) cell, innate-like T cell (iT), natural killer T cells (NKT), γδ T cell, invariant NKT cells (INKT), monocyte, or macrophage.

[0087] According to embodiments of the present invention, there is provided a medicament comprising any one of the compositions described herein for use in inactivating a CISH allele in a cell, wherein the medicament is administered by delivering to the cell the composition.

[0088] According to embodiments of the present invention, there is provided a use of any one of the compositions or modified cells described herein for adoptive immunotherapy, for example, to treat cancer.

[0089] According to embodiments of the present invention, there is provided a medicament comprising any one of the compositions or modified cells described herein for use in adoptive immunotherapy, for example, to treat cancer.

[0090] According to embodiments of the present invention, there is provided a kit for inactivating a CISH allele in a cell, comprising any one of the compositions described herein and instructions for delivering the composition to the cell.

[0091] In some embodiments, the composition is delivered to the cell ex vivo.

[0092] According to embodiments of the present invention, there is provided a kit for administering adoptive immunotherapy to a subject, comprising any one of the compositions or modified cells described herein and instructions for delivering any one of the compositions or modified cells to a subject in need of adoptive immunotherapy.

[0093] According to embodiments of the present invention, there is provided any one of the compositions or modified cells described herein for use in adoptive immunotherapy, comprising delivering any one of the compositions or modified cells described herein to a subject in need of adoptive immunotherapy.

[0094] A method of treating a disease or disorder, the method comprising delivering any one of the compositions or modified cells described herein to the subject, preferably wherein the disease or disorder is cancer.

[0095] According to embodiments of the present invention, there is provided a composition, method, process, kit, or use as characterized by one or more elements disclosed herein.

[0096] According to embodiments of the present invention, the modified immune cells (e.g., T cells) obtained by the described methods are intended to be used as a medicament for treating a cancer, infection, or immune disease in a subject in need thereof. The administration of the modified immune cell or a population thereof to a subject may be carried out in any convenient manner known in the art, including, but not limited to, aerosol inhalation, injection, ingestion, transfusion, implantation or transplantation. Injection or transfusion may be performed subcutaneously, intradermally, intratumorally, intranodally, intramedullary, intramuscularly, by intravenous or intralymphatic injection, or intraperitoneally. According to embodiments of the present invention, there is provided a method for adoptive cell therapy or prophylaxis comprising administering the modified cells to a subject suffering from or determined to be at risk of suffering from a cancer or an infection.

[0097] According to embodiments of the present invention, there is provided use of any one of the compositions or modified cells described herein for adoptive immunotherapy, comprising delivering the composition of any one of the compositions or modified cells described herein to a subject in need of adoptive immunotherapy.

[0098] According to embodiments of the present invention, there is provided a medicament comprising any one of the compositions or modified cells described herein for use in adoptive immunotherapy, wherein the medicament is administered by delivering any one of the compositions or modified cells described herein to a subject in need of adoptive immunotherapy.

[0099] According to embodiments of the present invention, there is provided an RNA molecule for use in modifying a cell (e.g. lymphocyte, T-cell, CAR-T cell) which may be used for adoptive immunotherapy. The RNA molecule may be delivered to the cell ex vivo, in vitro, or in vivo.

[0100] According to embodiments of the present invention, there is provided a kit for inactivating a CISH allele in a cell, comprising any one of the compositions described herein and instructions for delivering the composition to the cell.

[0101] According to embodiments of the present invention, there is provided a cell modified by the method described herein or modified using the compositions described herein.

[0102] According to embodiments of the present invention, there is provided a gene editing composition comprising an RNA molecule comprising a guide sequence portion having 17-50 contiguous nucleotides containing nucleotides in the sequence set forth in any one of SEQ ID NOS: 1-6838. In some embodiments, the RNA molecule further comprises a portion having a sequence which binds to a CRISPR nuclease. In some embodiments, the sequence which binds to a CRISPR nuclease is a tracrRNA sequence. In some embodiments the RNA comprising a guide sequence portion is a crRNA molecule. In some embodiments an RNA molecule comprising a guide sequence portion is a single-guide RNA (sgRNA) molecule.

[0103] In some embodiments, the RNA molecule further comprises a portion having a tracr mate sequence.

[0104] In some embodiments, the RNA molecule may further comprise one or more linker portions.

[0105] According to embodiments of the present invention, an RNA molecule may be up to 1000, 900, 800, 700, 600, 500, 450, 400, 350, 300, 290, 280, 270, 260, 250, 240, 230, 220, 210, 200, 190, 180, 170, 160, 150, 140, 130, 120, 110, or 100 nucleotides in length. Each possibility represents a separate embodiment. In embodiments of the present invention, the RNA molecule may be 17 up to 300 nucleotides in length, 100 up to 300 nucleotides in length, 150 up to 300 nucleotides in length, 100 up to 500 nucleotides in length, 100 up to 400 nucleotides in length, 200 up to 300 nucleotides in length, 100 to 200 nucleotides in length, or 150 up to 250 nucleotides in length. Each possibility represents a separate embodiment.

[0106] According to some embodiments of the present invention, the composition further comprises a tracrRNA molecule.

[0107] According to some embodiments of the present invention, there is provided a method for inactivating CISH expression in a cell, the method comprising delivering to the cell a composition comprising an RNA molecule comprising a guide sequence portion having 17-50 contiguous nucleotides containing nucleotides in the sequence set forth in any one of SEQ ID NOs: 1-6838 and a CRISPR nuclease.

[0108] According to embodiments of the present invention, at least one CRISPR nuclease and the RNA molecule or RNA molecules are delivered to the subject and/or cells substantially at the same time or at different times.

[0109] In some embodiments, a tracrRNA molecule is delivered to the subject and/or cells substantially at the same time or at different times as the CRISPR nuclease and RNA molecule or RNA molecules.

[0110] The compositions and methods of the present disclosure may be utilized for improved adoptive immunotherapy.

[0111] Any one of, or combination of, the strategies for deactivating CISH expression described herein may be used in the context of the invention.

[0112] In embodiments of the present invention, a guide RNA molecule is used to direct a CRISPR nuclease to an exon or a splice site of a CISH allele in order to create a double-stranded break (DSB), leading to insertion or deletion of nucleotides by inducing an error-prone non-homologous end-joining (NHEJ) mechanism and formation of a frameshift mutation in the CISH allele. The frameshift mutation may result in, for example, inactivation or knockout of the CISH allele by generation of an early stop codon in the CISH allele and to generation of a truncated protein or to nonsense-mediated mRNA decay of the transcript of the allele. In further embodiments, one RNA molecule is used to direct a CRISPR nuclease to a promotor of a CISH allele.

[0113] Embodiments of compositions described herein include at least one CRISPR nuclease, guide RNA molecule(s), and optionally a tracrRNA molecule(s), being effective in a subject or cells at the same time. The at least one CRISPR nuclease, guide RNA molecule(s), and optional tracrRNA molecule(s) may be delivered substantially at the same time or can be delivered at different times but have effect at the same time. For example, this includes delivering the CRISPR nuclease to the subject or cells before the guide RNA molecule and/or tracrRNA molecule is substantially extant in the subject or cells.

[0114] In some embodiments, the cell is a lymphocyte. In some embodiments, the cell is a T cell. In some embodiments, the cell is a T regulatory cell. In some embodiments, the cell is a B cell. In some embodiments, the cell is a natural killer (NK) cell. In some embodiments, the cell is a macrophage. In some embodiments, the cell is a stem cell. In some embodiments, the cell is a fibroblast, blood cell, hepatocyte, keratinocyte, or any other cell type capable of being reprogrammed to an induced pluripotent stem cell (iPSC).

### CISH Editing Strategies

[0115] The present invention provides methods to knockout CISH alleles in cells of a subject, thereby improving the performance of the cells, or cells derived therefrom, in adoptive transfer therapies.

[0116] CISH editing strategies include, but are not limited to, biallelic knockout by targeting any one of, or a combination of, Exons 1-3 and Intron 2, including within thirty nucleotides upstream and downstream of the exons to flank splice donor and acceptor sites, as frameshifts in these exons lead to non-functional, truncated CISH proteins or non-sense mediated decay of the mutated CISH transcripts.

### CRISPR Nucleases and PAM Recognition

[0117] In some embodiments, the sequence specific nuclease is selected from CRISPR nucleases, or is a functional variant thereof. In some embodiments, the sequence specific nuclease is an RNA guided DNA nuclease. In such embodiments, the RNA sequence which guides the RNA guided DNA nuclease (e.g., Cpf1) binds to and/or directs the RNA guided DNA nuclease to all CISH alleles in a cell. In some embodiments, the CRISPR complex does not further comprise a tracrRNA. A skilled artisan will appreciate that RNA molecules can be engineered to bind to a target of choice in a genome by commonly known methods in the art.

[0118] The term “PAM” as used herein refers to a nucleotide sequence of a target DNA located in proximity to the targeted DNA sequence and recognized by the CRISPR nuclease complex. The PAM sequence may differ depending on the nuclease identity. In addition, there are CRISPR nucleases that can target almost all PAMs. In some embodiments of the present invention, a CRISPR system utilizes one or more RNA molecules having a guide sequence portion to direct a CRISPR nuclease to a target DNA site via Watson-Crick base-pairing between the guide sequence portion and the protospacer on the target DNA site, which is next to the protospacer adjacent motif (PAM), which is an additional requirement for target recognition. The CRISPR nuclease then mediates cleavage of the target DNA site to create a double-stranded break within the protospacer.

[0119] In a non-limiting example, a type II CRISPR system utilizes a mature crRNA:tracrRNA complex that directs the CRISPR nuclease, e.g. Cas9 to the target DNA the target DNA via Watson-Crick base-pairing between the guide sequence portion of the crRNA and the protospacer on the target DNA next to the protospacer adjacent motif (PAM). A skilled artisan will appreciate that each of the engineered RNA molecule of the present invention is further designed such as to associate with a target genomic DNA sequence of interest next to a protospacer adjacent motif (PAM), e.g., a PAM matching the sequence relevant for the type of CRISPR nuclease utilized, such as for a non-limiting example, NGG or NAG, wherein “N” is any nucleobase, for Streptococcus pyogenes Cas9 WT (SpCAS9); NNGRRT for Staphylococcus aureus (SaCas9); NNNVRYM for Jejuni Cas9 WT; NGAN or NGNG for SpCas9-VQR variant; NGCG for SpCas9-VRER variant; NGAG for SpCas9-EQR variant; NRRH for SpCas9-NRRH variant, wherein N is any nucleobase, R is A or G and H is A, C, or T; NRTH for SpCas9-NRTH variant, wherein N is any nucleobase, R is A or G and H is A, C, or T; NRCH for SpCas9-NRCH variant, wherein N is any nucleobase, R is A or G and H is A, C, or T; NG for SpG variant of SpCas9 wherein N is any nucleobase; NG or NA for SpCas9-NG variant of SpCas9 wherein N is any nucleobase; NR or NRN or NYN for SpRY variant of SpCas9, wherein N is any nucleobase, R is A or G and Y is C or T; NNG for Streptococcus canis Cas9 variant (ScCas9), wherein N is any nucleobase; NNNRRT for SaKKH-Cas9 variant of Staphylococcus aureus (SaCas9), wherein N is any nucleobase, and R is A or G; NNNNGATT for Neisseria meningitidis (NmCas9), wherein N is any nucleobase; TTN for Alicyclobacillus acidiphilus Cas12b (AacCas12b), wherein N is any nucleobase; or TTTV for Cpf1, wherein V is A, C or G. RNA molecules of the present invention are each designed to form complexes in conjunction with one or more different CRISPR nucleases and designed to target polynucleotide sequences of interest utilizing one or more different PAM sequences respective to the CRISPR nuclease utilized.

[0120] In some embodiments, an RNA-guided DNA nuclease e.g., a CRISPR nuclease, may be used to cause a DNA break, either double or single-stranded in nature, at a desired location in the genome of a cell. The most commonly used RNA-guided DNA nucleases are derived from CRISPR systems, however, other RNA-guided DNA nucleases are also contemplated for use in the genome editing compositions and methods described herein. For instance, see U.S. Patent Publication No. 2015/0211023, incorporated herein by reference.

[0121] CRISPR systems that may be used in the practice of the invention vary greatly. CRISPR systems can be a type I, a type II, or a type III system. Non-limiting examples of suitable CRISPR proteins include Cas3, Cas4, Cas5, Cas5e (or CasD), Cas6, Cashe, Cas6f, Cas7, Cas8a1, Cas8a2, Cas8b, Cas8c, Cas9, Cas10, Cas1 Od, CasF, CasG, CasH, Csy1, Csy2, Csy3, Cse1 (or CasA), Cse2 (or CasB), Cse3 (or CasE), Cse4 (or CasC), Csc1, Csc2, Csa5, Csn2, Csm2, Csm3, Csm4, Csm5, Csm6, Cmr1, Cmr3, Cmr4, Cmr5, Cmr6, Csb1, Csb2, Csb3, Csx17, Csx14, Csx10, Csx16, CsaX, Csx3, Csz1, Csx15, Csf1, Csf2, Csf3, Csf4, and Cu1966.

[0122] In some embodiments, the RNA-guided DNA nuclease is a CRISPR nuclease derived from a type II CRISPR system (e.g., Cas9). The CRISPR nuclease may be derived from Streptococcus pyogenes, Streptococcus thermophilus, Streptococcus sp., Staphylococcus aureus, Neisseria meningitidis, Treponema denticola, Nocardiopsis dassonvillei, Streptomyces pristinaespiralis, Streptomyces viridochromogenes, Streptomyces viridochromogenes, Streptosporangium roseum, Streptosporangium roseum, Alicyclobacillus acidocaldarius, Bacillus pseudomycoides, Bacillus selenitireducens, Exiguobacterium sibiricum, Lactobacillus delbrueckii, Lactobacillus salivarius, Microscilla marina, Burkholderiales bacterium, Polaromonas naphthalenivorans, Polaromonas sp., Crocosphaera watsonii, Cyanothece sp., Microcystis aeruginosa, Synechococcus sp., Acetohalobium arabaticum, Ammonifex degensii, Caldicelulosiruptor becscii, Candidatus Desulforudis, Clostridium botulinum, Clostridium difficile, Finegoldia magna, Natranaerobius thermophilus, Pelotomaculum thermopropionicum, Acidithiobacillus caldus, Acidithiobacillus ferrooxidans, Allochromatium vinosum, Marinobacter sp., Nitrosococcus halophilus, Nitrosococcus watsoni, Pseudoalteromonas haloplanktis, Ktedonobacter racemifer, Methanohalobium evestigatum, Anabaena variabilis, Nodularia spumigena, Nostoc sp., Arthrospira maxima, Arthrospira platensis, Arthrospira sp., Lyngbya sp., Microcoleus chthonoplastes, Oscillatoria sp., Petrotoga mobilis, Thermosipho africanus, Acaryochloris marina, or any species which encodes a CRISPR nuclease with a known PAM sequence. CRISPR nucleases encoded by uncultured bacteria may also be used in the context of the invention. (See Burstein et al. Nature, 2017). Variants of CRIPSR proteins having known PAM sequences e.g., SpCas9 D1135E variant, SpCas9 VQR variant, SpCas9 EQR variant, or SpCas9 VRER variant may also be used in the context of the invention.

[0123] Thus, an RNA guided DNA nuclease of a CRISPR system, such as a Cas9 protein or modified Cas9 or homolog or ortholog of Cas9, or other RNA guided DNA nucleases belonging to other types of CRISPR systems, such as Cpf1 and its homologs and orthologs, may be used in the compositions of the present invention. Additional CRISPR nucleases may also be used, for example, the nucleases described in PCT International Application Publication Nos. WO2020/223514 and WO2020/223553, which are hereby incorporated by reference.

[0124] In certain embodiments, the CRIPSR nuclease may be a “functional derivative” of a naturally occurring Cas protein. A “functional derivative” of a native sequence polypeptide is a compound having a qualitative biological property in common with a native sequence polypeptide. “Functional derivatives” include, but are not limited to, fragments of a native sequence and derivatives of a native sequence polypeptide and its fragments, provided that they have a biological activity in common with a corresponding native sequence polypeptide. A biological activity contemplated herein is the ability of the functional derivative to hydrolyze a DNA substrate into fragments. The term “derivative” encompasses both amino acid sequence variants of polypeptide, covalent modifications, and fusions thereof. Suitable derivatives of a Cas polypeptide or a fragment thereof include but are not limited to mutants, fusions, covalent modifications of Cas protein or a fragment thereof. Derivatives include, but are not limited to, CRISPR nickases, catalytically inactive or “dead” CRISPR nucleases, and fusion of a CRISPR nuclease or derivative thereof to other enzymes such as base editors or retrotransposons. See for example, Anzalone et al. (2019) and PCT International Application No. PCT/US2020/037560.

[0125] In some embodiments, the CRISPR nuclease or derivative thereof may be fused to a protein that has an enzymatic activity. In some embodiments, the enzymatic activity modifies a target DNA. In some embodiments, the enzymatic activity is nuclease activity, methyltransferase activity, demethylase activity, DNA repair activity, DNA damage activity, deamination activity, dismutase activity, alkylation activity, depurination activity, oxidation activity, pyrimidine dimer forming activity, integrase activity, transposase activity, recombinase activity, polymerase activity, ligase activity, helicase activity, photolyase activity or glycosylase activity. In some cases, the enzymatic activity is nuclease activity. In some cases, the nuclease activity introduces a double strand break in the target DNA. In some cases, the enzymatic activity modifies a target polypeptide associated with the target DNA. In some cases, the enzymatic activity is methyltransferase activity, demethylase activity, acetyltransferase activity, deacetylase activity, kinase activity, phosphatase activity, ubiquitin ligase activity, deubiquitinating activity, adenylation activity, deadenylation activity, SUMOylating activity, deSUMOylating activity, ribosylation activity, deribosylation activity, myristoylation activity or demyristoylation activity. In some cases, the target polypeptide is a histone and the enzymatic activity is methyltransferase activity, demethylase activity, acetyltransferase activity, deacetylase activity, kinase activity, phosphatase activity, ubiquitin ligase activity or deubiquitinating activity.

[0126] Cas protein, which includes Cas protein or a fragment thereof, as well as derivatives of Cas protein or a fragment thereof, may be obtainable from a cell or synthesized chemically or by a combination of these two procedures. The cell may be a cell that naturally produces Cas protein, or a cell that naturally produces Cas protein and is genetically engineered to produce the endogenous Cas protein at a higher expression level or to produce a Cas protein from an exogenously introduced nucleic acid, which nucleic acid encodes a Cas that is same or different from the endogenous Cas.

[0127] In some cases, the cell does not naturally produce Cas protein and is genetically engineered to produce a Cas protein.

[0128] In some embodiments, the CRISPR nuclease is Cpf1. Cpf1 is a single RNA-guided endonuclease which utilizes a T-rich protospacer-adjacent motif. Cpf1 cleaves DNA via a staggered DNA double-stranded break. Two Cpf1 enzymes from Acidaminococcus and Lachnospiraceae have been shown to carry out efficient genome-editing activity in human cells. (See Zetsche et al., 2015).

[0129] Thus, an RNA guided DNA nuclease of a Type II CRISPR System, such as a Cas9 protein or modified Cas9 or homologs, orthologues, or variants of Cas9, or other RNA guided DNA nucleases belonging to other types of CRISPR systems, such as Cpf1 and its homologs, orthologues, or variants, may be used in the present invention.

[0130] In some embodiments, the guide molecule comprises one or more chemical modifications which imparts a new or improved property (e.g., improved stability from degradation, improved hybridization energetics, or improved binding properties with an RNA guided DNA nuclease). Suitable chemical modifications include, but are not limited to: modified bases, modified sugar moieties, or modified inter-nucleoside linkages. Non-limiting examples of suitable chemical modifications include: 4-acetylcytidine, 5-(carboxyhydroxymethyl) uridine, 2′-O-methylcytidine. 5-carboxymethylaminomethyl-2-thiouridine, 5-carboxymethylaminomethyluridine, dihydrouridine, 2′-O-methylpseudouridine. “beta, D-galactosylqueuosine”, 2′-O-methylguanosine, inosine, N6-isopentenyladenosine, 1-methyladenosine, 1-methylpseudouridine, 1-methylguanosine, 1-methylinosine, “2,2-dimethylguanosine”, 2-methyladenosine, 2-methylguanosine, 3-methylcytidine, 5-methylcytidine, N6-methyladenosine, 7-methylguanosine, 5-methylaminomethyluridine, 5-methoxyaminomethyl-2-thiouridine, “beta, D-mannosylqueuosine”, 5-methoxycarbonylmethyl-2-thiouridine, 5-methoxycarbonylmethyluridine, 5-methoxyuridine, 2-methylthio-N6-isopentenyladenosine, N-((9-beta-D-ribofuranosyl-2-methylthiopurine-6-yl)carbamoyl)threonine, N-((9-beta-D-ribofuranosylpurine-6-yl)N-methylcarbamoyl)threonine, uridine-5-oxyacetic acid-methylester, uridine-S-oxyacetic acid, wybutoxosine, queuosine, 2-thiocytidine, 5-methyl-2-thiouridine, 2-thiouridine, 4-thiouridine, 5-methyluridine, N-((9-beta-D-ribofuranosylpurine-6-yl)-carbamoyl)threonine, 2′-O-methyl-5-methyluridine, 2′-O-methyluridine, wybutosine, “3-(3-amino-3-carboxy-propyl)uridine, (acp3) u”, 2′-O-methyl (M), 3′-phosphorothioate (MS), 3′-thioPACE (MSP), pseudouridine, or 1-methyl pseudo-uridine. Each possibility represents a separate embodiment of the present invention.

[0131] In addition to targeting CISH alleles by a RNA-guided CRISPR nuclease, other means of inhibiting CISH expression in a target cell include but are not limited to use of a gapmer, shRNA, siRNA, a customized TALEN, meganuclease, or zinc finger nuclease, a small molecule inhibitor, and any other method known in the art for reducing or eliminating expression of a gene in a target cell. See, for example, U.S. Pat. Nos. 6,506,559; 7,560,438; 8,420,391; 8,552,171; 7,056,704; 7,078,196; 8,362,231; 8,372,968; 9,045,754; and PCT International Publication Nos. WO/2004/067736; WO/2006/097853; WO/2003/087341; WO/2000/0415661; WO/2003/080809; WO/2010/079430; WO/2010/079430; WO/2011/072246; WO/2018/057989; and WO/2017/164230, the entire contents of each of which are incorporated herein by reference.

[0132] Advantageously, the guide RNA molecules presented herein provide improved CISH knockout efficiency when complexed with a CRISPR nuclease in a cell relative to other guide RNA molecules. These specifically designed sequences may also be useful for identifying CISH target sites for other nucleotide targeting-based gene-editing or gene-silencing methods, for example, siRNA, TALENs, meganucleases or zinc-finger nucleases.

### Delivery to Cells

[0133] Any one of the compositions described herein may be delivered to a target cell by any suitable means. RNA molecule compositions of the present invention may be targeted to any cell which contains and/or expresses a CISH allele, such as a mammalian lymphocyte or stem cell. For example, in one embodiment the RNA molecule specifically targets CISH alleles in a target cell and the target cell is a lymphocyte, a T cell, a T regulatory cell, a B cell, a natural killer (NK) cell, a macrophage, a stem cell, or a fibroblast, blood cell, hepatocyte, keratinocyte, or any other cell type capable of being reprogrammed to an induced pluripotent stem cell (iPSC). The delivery to the cell may be performed in vivo, ex vivo, or in vitro. Further, the nucleic acid compositions described herein may be delivered to a cell as one or more of DNA molecules, RNA molecules, ribonucleoproteins (RNP), nucleic acid vectors, or any combination thereof.

[0134] In some embodiments, the RNA molecule comprises a chemical modification. Non-limiting examples of suitable chemical modifications include 2′-0-methyl (M), 2′-0-methyl, 3′phosphorothioate (MS) or 2′-0-methyl, 3′thioPACE (MSP), pseudouridine, and 1-methyl pseudo-uridine. Each possibility represents a separate embodiment of the present invention.

[0135] In some embodiments, any one of the compositions described herein is delivered to a cell in-vivo. The composition may be delivered to the cell by any known in-vivo delivery method, including but not limited to, viral transduction, for example, using a lentivirus or adeno-associated virus (AAV), nanoparticle delivery, etc. Additional detailed delivery methods are described throughout this section.

[0136] In some embodiments, any one of the compositions described herein is delivered to a cell ex-vivo. The composition may be delivered to the cell by any known ex-vivo delivery method, including but not limited to, nucleofection, electroporation, viral transduction, for example, using a lentivirus or adeno-associated virus (AAV), nanoparticle delivery, liposomes, etc. Additional detailed delivery methods are described throughout this section.

[0137] Any suitable viral vector system may be used to deliver nucleic acid compositions e.g., the RNA molecule compositions of the subject invention. Conventional viral and non-viral based gene transfer methods can be used to introduce nucleic acids and target tissues. In certain embodiments, nucleic acids are administered for in vivo or ex vivo gene therapy uses. Non-viral vector delivery systems include naked nucleic acid, and nucleic acid complexed with a delivery vehicle such as a liposome or poloxamer. For a review of gene therapy procedures, see Anderson (1992); Nabel & Felgner (1993); Mitani & Caskey (1993); Dillon (1993); Miller (1992); Van Brunt (1988); Vigne (1995); Kremer & Perricaudet (1995); Haddada et al. (1995); and Yu et al. (1994).

[0138] Methods of non-viral delivery of nucleic acids and/or proteins include electroporation, lipofection, microinjection, biolistics, particle gun acceleration, virosomes, liposomes, immunoliposomes, lipid nanoparticles (LNPs), polycation or lipid:nucleic acid conjugates, artificial virions, and agent-enhanced uptake of nucleic acids or can be delivered to plant cells by bacteria or viruses (e.g., Agrobacterium, Rhizobium sp. NGR234, Sinorhizoboium meliloti, Mesorhizobium loti, tobacco mosaic virus, potato virus X, cauliflower mosaic virus and cassava vein mosaic virus). (See, e.g., Chung et al., 2006). Sonoporation using, e.g., the Sonitron 2000 system (Rich-Mar), can also be used for delivery of nucleic acids. Cationic-lipid mediated delivery of proteins and/or nucleic acids is also contemplated as an in vivo, ex vivo, or in vitro delivery method. (See Zuris et al. (2015); see also Coelho et al. (2013); Judge et al. (2006); and Basha et al. (2011)).

[0139] Non-viral vectors, such as transposon-based systems e.g. recombinant Sleeping Beauty transposon systems or recombinant PiggyBac transposon systems, may also be delivered to a target cell and utilized for transposition of a polynucleotide sequence of a molecule of the composition or a polynucleotide sequence encoding a molecule of the composition in the target cell.

[0140] Additional exemplary nucleic acid delivery systems include those provided by Amaxa® Biosystems (Cologne, Germany), Maxcyte, Inc. (Rockville, Md.), BTX Molecular Delivery Systems (Holliston, Mass.) and Copernicus Therapeutics Inc., (see, e.g., U.S. Pat. No. 6,008,336). Lipofection is described in e.g., U.S. Pat. Nos. 5,049,386, 4,946,787; and 4,897,355, and lipofection reagents are sold commercially (e.g., Transfectam™, Lipofectin™, and Lipofectamine™ RNAiMAX). Cationic and neutral lipids that are suitable for efficient receptor-recognition lipofection of polynucleotides include those disclosed in PCT International Publication Nos. WO/1991/017424 and WO/1991/016024. Delivery can be to cells (ex vivo administration) or target tissues (in vivo administration).

[0141] The preparation of lipid:nucleic acid complexes, including targeted liposomes such as immunolipid complexes, is well known to one of skill in the art (see, e.g., Crystal, Science (1995); Blaese et al., (1995); Behr et al., (1994); Remy et al. (1994); Gao and Huang (1995); Ahmad and Allen (1992); U.S. Pat. Nos. 4,186,183; 4,217,344; 4,235,871; 4,261,975; 4,485,054; 4,501,728; 4,774,085; 4,837,028; and 4,946,787).

[0142] Additional methods of delivery include the use of packaging the nucleic acids to be delivered into EnGeneIC delivery vehicles (EDVs). These EDVs are specifically delivered to target tissues using bispecific antibodies where one arm of the antibody has specificity for the target tissue and the other has specificity for the EDV. The antibody brings the EDVs to the target cell surface and then the EDV is brought into the cell by endocytosis. Once in the cell, the contents are released (See MacDiarmid et al., 2009).

[0143] Delivery vehicles include, but are not limited to, bacteria, preferably non-pathogenic, vehicles, nanoparticles, exosomes, microvesicles, gene gun delivery, for example, by attachment of a composition to a gold particle which is fired into a cell using via a “gene-gun”, viral vehicles, including but not limited to lentiviruses, AAV, and retroviruses), virus-like particles (VLPs). large VLPs (LVLPs), lentivirus-like particles, transposons, viral vectors, naked vectors, DNA, or RNA, among other delivery vehicles known in the art.

[0144] The delivery of a CRISPR nuclease and/or a polynucleotide encoding the CRIPSR nuclease, and optionally additional nucleotide molecules and/or additional proteins or peptides, may be performed by utilizing a single delivery vehicle or method or a combination of different delivery vehicles or methods. For example, a CRISPR nuclease may be delivered to a cell utilizing an LNP, and a crRNA molecule and tracrRNA molecule may be delivered to the cell utilizing AAV. Alternatively, a CRISPR nuclease may be delivered to a cell utilizing an AAV particle, and a crRNA molecule and tracrRNA molecule may be delivered to the cell utilizing a separate AAV particle, which may be advantageous due to size limitations.

[0145] The use of RNA or DNA viral based systems for viral mediated delivery of nucleic acids take advantage of highly evolved processes for targeting a virus to specific cells in the body and trafficking the viral payload to the nucleus. Viral vectors can be administered directly to patients (in vivo) or they can be used to treat cells in vitro and the modified cells are administered to patients (ex vivo). Conventional viral based systems for the delivery of nucleic acids include, but are not limited to, retroviral, lentivirus, adenoviral, adeno-associated, vaccinia and herpes simplex virus vectors for gene transfer. An RNA virus may be utilized for delivery of the compositions described herein. Additionally, high transduction efficiencies have been observed in many different cell types and target tissues. Nucleic acid of the invention may be delivered by non-integrating lentivirus. Optionally, RNA delivery with Lentivirus is utilized. Optionally the lentivirus includes mRNA of the nuclease and a guide RNA molecule. Optionally, the lentivirus includes the nuclease protein and a guide RNA molecule. Optionally the lentivirus includes mRNA of the nuclease, a guide RNA molecule, and a tracrRNA molecule. Optionally, the lentivirus includes the nuclease protein, a guide RNA molecule, and a tracrRNA molecule.

[0146] The tropism of a retrovirus can be altered by incorporating foreign envelope proteins, expanding the potential target population of target cells. Lentiviral vectors are retroviral vectors that are able to transduce or infect non-dividing cells and typically produce high viral titers. Selection of a retroviral gene transfer system depends on the target tissue. Retroviral vectors are comprised of cis-acting long terminal repeats with packaging capacity for up to 6-10 kb of foreign sequence. The minimum cis-acting LTRs are sufficient for replication and packaging of the vectors, which are then used to integrate the therapeutic gene into the target cell to provide permanent transgene expression. Widely used retroviral vectors include those based upon murine leukemia virus (MuLV), gibbon ape leukemia virus (GaLV), Simian Immunodeficiency virus (SIV), human immunodeficiency virus (HIV), and combinations thereof (See, e.g., Buchschacher et al. (1992); Johann et al. (1992); Sommerfelt et al. (1990); Wilson et al. (1989); Miller et al. (1991); PCT International Publication No. WO/1994/026877A1).

[0147] At least six viral vector approaches are currently available for gene transfer in clinical trials, which utilize approaches that involve complementation of defective vectors by genes inserted into helper cell lines to generate the transducing agent.

[0148] pLASN and MFG-S are examples of retroviral vectors that have been used in clinical trials (See Dunbar et al., 1995; Kohn et al., 1995; Malech et al., 1997). PA317/pLASN was the first therapeutic vector used in a gene therapy trial (Blaese et al., 1995). Transduction efficiencies of 50% or greater have been observed for MFG-S packaged vectors. (Ellem et al., (1997); Dranoff et al., 1997).

[0149] Packaging cells are used to form virus particles that are capable of infecting a host cell. Such cells include 293 cells, which package adenovirus, AAV, and Psi-2 cells or PA317 cells, which package retrovirus. Viral vectors used in gene therapy are usually generated by a producer cell line that packages a nucleic acid vector into a viral particle. The vectors typically contain the minimal viral sequences required for packaging and subsequent integration into a host (if applicable), other viral sequences being replaced by an expression cassette encoding the protein to be expressed. The missing viral functions are supplied in trans by the packaging cell line. For example, AAV vectors used in gene therapy typically only possess inverted terminal repeat (ITR) sequences from the AAV genome which are required for packaging and integration into the host genome. Viral DNA is packaged in a cell line, which contains a helper plasmid encoding the other AAV genes, namely rep and cap, but lacking ITR sequences. The cell line is also infected with adenovirus as a helper. The helper virus promotes replication of the AAV vector and expression of AAV genes from the helper plasmid. The helper plasmid is not packaged in significant amounts due to a lack of ITR sequences. Contamination with adenovirus can be reduced by, e.g., heat treatment to which adenovirus is more sensitive than AAV. Additionally, AAV can be produced at clinical scale using baculovirus systems (see U.S. Pat. No. 7,479,554).

[0150] In many gene therapy applications, it is desirable that the gene therapy vector be delivered with a high degree of specificity to a particular tissue type. Accordingly, a viral vector can be modified to have specificity for a given cell type by expressing a ligand as a fusion protein with a viral coat protein on the outer surface of the virus. The ligand is chosen to have affinity for a receptor known to be present on the cell type of interest. For example, Han et al. (1995) reported that

[0151] Moloney murine leukemia virus can be modified to express human heregulin fused to gp70, and the recombinant virus infects certain human breast cancer cells expressing human epidermal growth factor receptor. This principle can be extended to other virus-target cell pairs, in which the target cell expresses a receptor and the virus expresses a fusion protein comprising a ligand for the cell-surface receptor. For example, filamentous phage can be engineered to display antibody fragments (e.g., FAB or Fv) having specific binding affinity for virtually any chosen cellular receptor. Although the above description applies primarily to viral vectors, the same principles can be applied to nonviral vectors. Such vectors can be engineered to contain specific uptake sequences which favor uptake by specific target cells.

[0152] Gene therapy vectors can be delivered in vivo by administration to an individual patient, for example by systemic administration (e.g., intravitreal, intravenous, intraperitoneal, intramuscular, subdermal, or intracranial infusion) or topical application.

[0153] Alternatively, vectors can be delivered to cells ex vivo, such as cells explanted from an individual patient (e.g., lymphocytes, bone marrow aspirates, tissue biopsy) or universal donor hematopoietic stem cells, followed by reimplantation of the cells into a patient, optionally after selection for cells which have incorporated the vector. A non-limiting exemplary ex vivo approach may involve removal of tissue (e.g., peripheral blood, bone marrow, and spleen) from a patient for culture, nucleic acid transfer to the cultured cells (e.g., hematopoietic stem cells), followed by grafting the cells to a target tissue (e.g., bone marrow, and spleen) of the patient. In some embodiments, the stem cell or hematopoietic stem cell may be further treated with a viability enhancer.

[0154] Ex vivo cell transfection for diagnostics, research, or for gene therapy (e.g., via re-infusion of the transfected cells into the host organism) is well known to those of skill in the art. In a preferred embodiment, cells are isolated from the subject organism, transfected with a nucleic acid composition, and re-infused back into the subject organism (e.g., patient). Various cell types suitable for ex vivo transfection are well known to those of skill in the art (See, e.g., Freshney, “Culture of Animal Cells, A Manual of Basic Technique and Specialized Applications (6th edition, 2010) and the references cited therein for a discussion of how to isolate and culture cells from patients).

[0155] Vectors (e.g., retroviruses, liposomes, etc.) containing therapeutic nucleic acid compositions can also be administered directly to an organism for transduction of cells in vivo. Administration is by any of the routes normally used for introducing a molecule into ultimate contact with blood or tissue cells including, but not limited to, injection, infusion, topical application (e.g., eye drops and cream) and electroporation. Suitable methods of administering such nucleic acids are available and well known to those of skill in the art, and, although more than one route can be used to administer a particular composition, a particular route can often provide a more immediate and more effective reaction than another route. According to some embodiments, the composition is delivered via IV injection.

[0156] Vectors suitable for introduction of transgenes into immune cells (e.g., T-cells) include non-integrating lentivirus vectors. See, e.g., U.S. Patent Publication No. 2009/0117617.

[0157] As mentioned above, the compositions described herein may be delivered to a target cell using a non-integrating lentiviral particle method, e.g. a LentiFlash® system. Such a method may be used to deliver mRNA or other types of RNAs into the target cell, such that delivery of the RNAs to the target cell results in assembly of the compositions described herein inside of the target cell. See also PCT International Publication Nos. WO/2013/014537, WO/2014/016690, WO/2016/185125, WO/2017/194902, and WO/2017/194903.

[0158] Pharmaceutically acceptable carriers are determined in part by the particular composition being administered, as well as by the particular method used to administer the composition. Accordingly, there is a wide variety of suitable formulations of pharmaceutical compositions available, as described below (See, e.g., Remington's Pharmaceutical Sciences, 17th ed., 1989).

Examples of RNA Guide Sequences which Specifically Target Alleles of CISH Gene

[0159] Although a large number of guide sequences can be designed to target the CISH gene, the nucleotide sequences described in Table 2 and are identified by SEQ ID NOs: 1-6833 were specifically selected to effectively implement the methods set forth herein.

[0160] Table 2 lists guide sequences designed for use as described in the embodiments above to associate specific sequences within a CISH allele. Each engineered guide molecule is further designed such as to associate with a target genomic DNA sequence of interest that lies next to a protospacer adjacent motif (PAM), e.g., a PAM matching the sequence NGG or NAG, where “N” is any nucleobase. The guide sequences were designed to work in conjunction with one or more different CRISPR nucleases, including, but not limited to, e.g. SpCas9WT (PAM SEQ: NGG), SpCas9.VQR.1 (PAM SEQ: NGAN), SpCas9.VQR.2 (PAM SEQ: NGNG), SpCas9.EQR (PAM SEQ: NGAG), SpCas9.VRER (PAM SEQ: NGCG), SaCas9WT (PAM SEQ: NNGRRT), SpRY (PAM SEQ: NRN or NYN), NmCas9WT (PAM SEQ: NNNNGATT), Cpf1 (PAM SEQ: TTTV), JeCas9WT (PAM SEQ: NNNVRYM), OMNI-50 (PAM SEQ: NGG), OMNI-79 (PAM SEQ: NGG), OMNI-103 (PAM SEQ: NNRACT), OMNI-159 (NNNNCMAN), or OMNI-124 (PAM SEQ: NNGNRMNN).

[0161] Additional description of OMNI CRISPR nucleases is provided in PCT International Application Publication No. WO 2023/019269 A2, PCT International Application Publication Nos. WO 2022/170199 A2 and WO 2023/107946 A2, U.S. Pat. No. 11,666,641 B2 and PCT International Application Publication Nos. WO 2020/223514 A2, WO 2022/098693 A1, and WO 2023/019263 A1, U.S. Application Publication No. 2023/0122086 A1 and PCT International Application Publication Nos. WO 2021/248016 A2 and WO 2023/102407 A2, PCT International Application Publication No. WO 2022/087135 A1, and PCT International Application Publication No. WO 2022/226215 A1, the contents of each of which are hereby incorporated by reference.

[0162] RNA molecules of the present invention are each designed to form complexes in conjunction with one or more different CRISPR nucleases and designed to target polynucleotide sequences of interest utilizing one or more different PAM sequences respective to the CRISPR nuclease utilized.

[0163] As used herein, the following nucleotide identifiers are used to represent a referenced nucleotide base(s):

TABLE 1

| | |
|---|---|
| Nucleotide | |
| reference | Base(s) represented |

| | | | | |
|---|---|---|---|---|
| A | A | | | |
| C | | C | | |
| G | | | G | |
| T | | | | T |
| W | A | | | T |
| S | | C | G | |
| M | A | C | | |
| K | | | G | T |
| R | A | | G | |
| Y | | C | | T |
| B | | C | G | T |
| D | A | | G | T |
| H | A | C | | T |
| V | A | C | G | |
| N | A | C | G | T |

TABLE 2
Guide sequence portions designed to associate with specific CISH gene targets

| | SEQ ID NOs: of | SEQ ID NOs: of | SEQ ID NOs: of |
|---|---|---|---|
| Target | 20 base guides | 21 base guides | 22 base guides |
| 3:50611599-50611805 | 1-302 | 303-550 | 551-820 |
| Exon 1, including 30 nt | | | |
| upstream and 30 nt | | | |
| downstream of the exon | | | |
| 3:50608341-50608624 | 821-1314 | 1315-1790 | 1791-2270 |
| Exon 2, including 30 nt | | | |
| upstream and 30 nt | | | |
| downstream of the exon | | | |
| 3:50607575-50608173 | 2271-3410 | 3411-4530 | 4531-5660 |
| Exon 3, including 30 nt | | | |
| upstream and 30 nt | | | |
| downstream of the exon | | | |
| 3:50608112-50608403 | 821, 823, 826, | 1315, 1317, 1320, | 1791, 1793, |
| Intron 2 | 830, 835, 840, | 1324, 1329, 1334, | 1796, 1800, |
| | 846-847, 850, | 1340-1341, 1344, | 1805, 1810, |
| | 862-863, 869, | 1356-1357, 1363, | 1816-1817, |
| | 881, 890, 902, | 1374, 1383, 1393, | 1820, 1831- |
| | 909, 913, 916, | 1400, 1407, 1413, | 1832, 1838, |
| | 922, 930, 935, | 1421, 1426, 1443, | 1850, 1859, |
| | 954, 963, 980- | 1452, 1467-1468, | 1876, 1883, |
| | 981, 983, 987, | 1470, 1473, 1481- | 1889, 1897, |
| | 996-998, 1006, | 1483, 1491, 1496, | 1902, 1919, |
| | 1011, 1013, | 1498, 1508, 1511, | 1928, 1944- |
| | 1024, 1027, | 1515, 1518, 1522- | 1945, 1947, |
| | 1031, 1034, | 1523, 1537, 1550, | 1950, 1959- |
| | 1038-1039, | 1556, 1558, 1564, | 1961, 1969, |
| | 1053, 1067, | 1569, 1573, 1575, | 1974, 1976, |
| | 1073, 1075, | 1588, 1592, 1605, | 1987, 1990, |
| | 1081, 1087, | 1616-1617, 1634, | 1994, 1997, |
| | 1091, 1093, | 1637, 1650, 1658, | 2001-2002, |
| | 1107, 1111, | 1675, 1690, 1699, | 2016, 2029, |
| | 1124, 1135- | 1705, 1708, 1716, | 2035, 2037, |
| | 1136, 1153, | 1720, 1728, 1732, | 2043, 2048, |
| | 1156, 1171, | 1738, 1743, 1751, | 2052, 2054, |
| | 1179, 1197, | 1773, 1781, 1783, | 2067, 2084, |
| | 1209, 1213, | 3421, 3439, 3441, | 2095-2096, |
| | 1222, 1228, | 3467, 3470, 3515, | 2113, 2116, |
| | 1231, 1239, | 3537, 3555, 3568, | 2130, 2138, |
| | 1243, 1251, | 3597, 3618, 3621, | 2155, 2170, |
| | 1255, 1261, | 3637, 3668, 3684, | 2179, 2185, |
| | 1266, 1274, | 3727, 3745, 3755, | 2188, 2196, |
| | 1297, 1305, | 3760, 3763, 3768, | 2200, 2208, |
| | 1307, 2281, | 3777, 3780, 3797, | 2212, 2218, |
| | 2299, 2301, | 3803-3804, 3812, | 2223, 2231, |
| | 2327, 2330, | 3826, 3850, 3870, | 2253, 2261, |
| | 2376, 2398, | 3891, 3893, 3909, | 2263, 4541, |
| | 2416, 2430, | 3918, 3936, 3941, | 4559, 4561, |
| | 2459, 2480, | 3961-3962, 3971, | 4587, 4590, |
| | 2483, 2499, | 4029, 4065, 4079, | 4635, 4657, |
| | 2531, 2547, | 4081-4082, 4116, | 4688, 4717, |
| | 2591, 2610, | 4119, 4130, 4166, | 4738, 4741, |
| | 2620, 2625, | 4172, 4183, 4231, | 4757, 4789, |
| | 2628, 2633, | 4258, 4309, 4315, | 4805, 4849, |
| | 2642, 2645, | 4329, 4333, 4364, | 4867, 4877, |
| | 2662, 2668- | 4375, 4386, 4410, | 4882, 4885, |
| | 2669, 2677, | 4425, 4443, 4454, | 4890, 4899, |
| | 2692, 2717, | 4457, 4469, 4485, | 4902, 4919, |
| | 2738, 2759, | 4515, 4517, and | 4925-4926, |
| | 2761, 2777, | 6049-6438 | 4934, 4948, |
| | 2786, 2807, | | 4973, 4993, |
| | 2812, 2832- | | 5014, 5016, |
| | 2833, 2842, | | 5032, 5041, |
| | 2900, 2939, | | 5060, 5065, |
| | 2953, 2955- | | 5085-5086, |
| | 2956, 2990, | | 5095, 5153, |
| | 2993, 3004, | | 5190, 5204, |
| | 3022, 3042, | | 5206-5207, |
| | 3048, 3059, | | 5243, 5246, |
| | 3090, 3107, | | 5257, 5293, |
| | 3134, 3186, | | 5299, 5310, |
| | 3192, 3206, | | 5358, 5385, |
| | 3210, 3241, | | 5437, 5443, |
| | 3252, 3263, | | 5456, 5460, |
| | 3287, 3302, | | 5491, 5502, |
| | 3323, 3334, | | 5513, 5537, |
| | 3337, 3349, | | 5552, 5573, |
| | 3365, 3395, | | 5584, 5587, |
| | 3397, and | | 5615, 5645, |
| | 5661-6048 | | 5647, and |
| | | | 6439-6830 |

The indicated locations listed in column 1 of the Table 2 are based on gnomAD v3 database and UCSC Genome Browser assembly ID: hg38, Sequencing/Assembly provider ID: Genome Reference Consortium Human GRCh38.p12 (GCA_000001405.27). Assembly date: December 2013 initial release; December 2017 patch release 12.

[0164] Examples are provided below to facilitate a more complete understanding of the invention. The following examples illustrate the exemplary modes of making and practicing the invention. However, the scope of the invention is not limited to specific embodiments disclosed in these Examples, which are for purposes of illustration only.

### EXPERIMENTAL DETAILS

### Example 1: CISH Modification Analysis

[0165] Guide sequences comprising 17-50 contiguous nucleotides containing nucleotides in the sequence set forth in any one of SEQ ID NOs: 1-6833 are screened for high on target activity using a CRISPR nuclease in T cells. On target activity is determined by DNA capillary electrophoresis analysis.

### Example 2: CISH Editing in HeLa and Primary T Cells

[0166] CISH editing in HeLa cells and primary T cells using a subset of the disclosed CISH-targeting guide sequence portions are shown in FIG. 1 and FIG. 2.

[0167] A summary table of the CISH editing data is shown below:

TABLE 3

| | | | % editing | % editing |
|---|---|---|---|---|
| Target | | | NGS | NGS |
| Site | Spacer Name | Guide Sequence Portion | (HeLa) | (T cells) |
| 3 | hCISH_S3_22bp_II | CUCGCCCUCGCAGGCGGUCCGC | 34.82 | |
| | | (SEQ ID NO: 6831) | | |
| 4 | hCISH_S4_22bp_II | CGGGGCGCGCGGGCGCAGGACA | 94.39 | 68.65 |
| | | (SEQ ID NO: 6832) | | |
| 7 | hCISH_S7_22bp_II | CGGCAGCGGCGACUCCGGAGUG | 89.76 | 51.71 |
| | | (SEQ ID NO: 658) | | |
| 8 | hCISH_S8_22bp_II | GGACCAUGUCCCCGCGGCAGCG | 81.17 | |
| | | (SEQ ID NO: 746) | | |
| 9 | hCISH_S9_22bp_II | GGGAGGGCUUGACGGGCCAGAG | 83.45 | 43.745 |
| | | (SEQ ID NO: 6833) | | |
| 11 | hCISH_S11_22bp_II | UCGUCCUUUGCUGGCUGUGGAG | 77.91 | |
| | | (SEQ ID NO: 2209) | | |
| 13 | hCISH_S13_22bp_II | GGCCCCAGCAGGCAAGGGCUGC | 32.10 | |
| | | (SEQ ID NO: 2127) | | |
| 16 | hCISH_S16_22bp_II | CACUAUGUCCCUUGGCCCCCUC | 41.19 | |
| | | (SEQ ID NO: 6537) | | |
| 20 | hCISH_S20_22bp_II | ACCAAUGUACGCAUUGAGUAUG | 64.21 | |
| | | (SEQ ID NO: 4582) | | |
| 22 | hCISH_S22_22bp_II | UAUGCCGACUCCAGCUUCCGUC | 79.55 | |
| | | (SEQ ID NO: 5467) | | |

[0168] OMNI-103 related sequences are provided in the table below:

TABLE 4

| | | OMNI-103 DNA | |
|---|---|---|---|
| | | sequence codon | OMNI-103 |
| OMNI-103 | OMNI-103 | optimized for | sgRNA |
| Amino Acid | DNA | expression | scaffold |
| Sequence | sequence | in human cells | sequence |
| SEQ ID NO: | SEQ ID NO: | SEQ ID NO: | SEQ ID NO: |
| 6839 | 6840 | 6841 | 6842 |

### REFERENCES

[0169] 1. Ahmad and Allen (1992) “Antibody-mediated Specific Binging and Cytotoxicity of Lipsome-entrapped Doxorubicin to Lung Cancer Cells in Vitro”, Cancer Research 52:4817-20.
[0170] 2. Anderson (1992) “Human gene therapy”, Science 256:808-13.
[0171] 3. Anzalone et al. (2019) “Search-and-replace genomme editing without double-strand brakes or donor DNA”, Nature 576, 149-157.
[0172] 4. Basha et al. (2011) “Influence of Cationic Lipid Composition on Gene Silencing Properties of Lipid Nanoparticle Formulations of siRNA in Antigen-Presenting Cells”, Mol. Ther. 19(12):2186-200.
[0173] 5. Behr (1994) Gene transfer with synthetic cationic amphiphiles: Prospects for gene therapy”, Bioconjuage Chem 5:382-89.
[0174] 6. Blaese (1995) “Vectors in cancer therapy: how will they deliver”, Cancer Gene Ther. 2:291-97.
[0175] 7. Blaese et al. (1995) “T lympocyte-directed gene therapy for ADA-SCID: initial trial results after 4 years”, Science 270(5235):475-80.
[0176] 8. Buchschacher and Panganiban (1992) “Human immunodeficiency virus vectors for inducible expression of foreign genes”, J. Virol. 66:2731-39.
[0177] 9. Burstein et al. (2017) “New CRISPR-Cas systems from uncultivated microbes”, Nature 542:237-41.
[0178] 10. Chang and Wilson (1987) “Modification of DNA ends can decrease end-joining relative to homologous recombination in mammalian cells”, Proc. Natl. Acad. Sci. USA 84:4959-4963.
[0179] 11. Chung et al. (2006) “Agrobacterium is not alone: gene transfer to plants by viruses and other bacteria”, Trends Plant Sci. 11(1):1-4.
[0180] 12. Coelho et al. (2013) “Safety and efficacy of RNAi therapy for transthyretin amyloidosis” N. Engl. J. Med. 369, 819-829.
[0181] 13. Collias and Beisel (2021) “CRISPR technologies and the search for the PAM-free nuclease”, Nature Communications 12, 555.
[0182] 14. Crystal (1995) “Transfer of genes to humans: early lessons and obstacles to success”, Science 270(5235):404-10.
[0183] 15. Dillon (1993) “Regulation gene expression in gene therapy” Trends in Biotechnology 11(5):167-173.
[0184] 16. Dranoff et al. (1997) “A phase I study of vaccination with autologous, irradiated melanoma cells engineered to secrete human granulocyte macrophage colony stimulating factor”, Hum. Gene Ther. 8(1):111-23.
[0185] 17. Dunbar et al. (1995) “Retrovirally marked CD34-enriched peripheral blood and bone marrow cells contribute to long-term engraftment after autologous transplantation”, Blood 85:3048-57.
[0186] 18. Ellem et al. (1997) “A case report: immune responses and clinical course of the first human use of ganulocyte/macrophage-colony-stimulating-factor-tranduced autologous melanoma cells for immunotherapy”, Cancer Immunol Immunother 44:10-20.
[0187] 19. Gao and Huang (1995) “Cationic liposome-mediated gene transfer” Gene Ther. 2(10):710-22.
[0188] 20. Haddada et al. (1995) “Gene Therapy Using Adenovirus Vectors”, in: The Molecular Repertoire of Adenoviruses III: Biology and Pathogenesis, ed. Doerfler and Böhm, pp. 297-306.
[0189] 21. Han et al. (1995) “Ligand-directed retro-viral targeting of human breast cancer cells”, Proc Natl Acad Sci U.S.A. 92(21):9747-51.
[0190] 22. Hu et al. (2018) “Evolved Cas9 variants with broad PAM compatibility and high DNA specificity”, Nature 556(7699):57-63.
[0191] 23. Jinek et al. (2012) “A programmable dual-RNA-guided DNA endonuclease in adaptive bacterial immunity,” Science 337(6096):816-21.
[0192] 24. Johan et al. (1992) “GLVR1, a receptor for gibbon ape leukemia virus, is homologous to a phosphate permease of Neurospora crassa and is expressed at high levels in the brain and thymus”, J Virol 66(3):1635-40.
[0193] 25. Judge et al. (2006) “Design of noninflammatory synthetic siRNA mediating potent gene silencing in vivo”, Mol Ther. 13(3):494-505.
[0194] 26. Kohn et al. (1995) “Engraftment of gene-modified umbilical cord blood cells in neonates with adnosine deaminase deficiency”, Nature Medicine 1:1017-23.
[0195] 27. Kremer and Perricaudet (1995) “Adenovirus and adeno-associated virus mediated gene transfer”, Br. Med. Bull. 51(1):31-44.
[0196] 28. Macdiarmid et al. (2009) “Sequential treatment of drug-resistant tumors with targeted minicells containing siRNA or a cytotoxic drug”, Nat Biotechnol. 27(7):643-51.
[0197] 29. Malech et al. (1997) “Prolonged production of NADPH oxidase-corrected granulocytes after gene therapy of chronic granulomatous disease”, PNAS 94(22):12133-38.
[0198] 30. Miller et al. (1991) “Construction and properties of retrovirus packaging cells based on gibbon ape leukemia virus”, J Virol. 65(5):2220-24.
[0199] 31. Miller (1992) “Human gene therapy comes of age”, Nature 357:455-60.
[0200] 32. Mitani and Caskey (1993) “Delivering therapeutic genes-matching approach and application”, Trends in Biotechnology 11(5):162-66.
[0201] 33. Nabel and Felgner (1993) “Direct gene transfer for immunotherapy and immunization”, Trends in Biotechnology 11(5):211-15.
[0202] 34. Nishimasu et al. (2018) “Engineered CRISPR-Cas9 nuclease with expanded targeting space”, Science 361(6408):1259-1262.
[0203] 35. Remy et al. (1994) “Gene Transfer with a Series of Lipphilic DNA-Binding Molecules”, Bioconjugate Chem. 5(6):647-54.
[0204] 36. Sentmanat et al. (2018) “A Survey of Validation Strategies for CRISPR-Cas9 Editing”, Scientific Reports 8:888, doi:10.1038/s41598-018-19441-8.
[0205] 37. Sommerfelt et al. (1990) “Localization of the receptor gene for type D simian retroviruses on human chromosome 19”, J. Virol. 64(12):6214-20.
[0206] 38. Van Brunt (1988) “Molecular framing: transgenic animals as bioactors” Biotechnology 6:1149-54.
[0207] 39. Vigne et al. (1995) “Third-generation adenovectors for gene therapy”, Restorative Neurology and Neuroscience 8(1,2):35-36.
[0208] 40. Walton et al. (2020) “Unconstrained genome targeting with near-PAMless engineered CRISPR-Cas9 variants”, Science 368(6488):290-296.
[0209] 41. Weissman and Kariko (2015) “mRNA: Fulfilling the promise of gene therapy”, Molecular Therapy (9):1416-7.
[0210] 42. Wilson et al. (1989) “Formation of infectious hybrid virion with gibbon ape leukemia virus and human T-cell leukemia virus retroviral envelope glycoproteins and the gag and pol proteins of Moloney murine leukemia virus”, J. Virol. 63:2374-78.
[0211] 43. Yu et al. (1994) “Progress towards gene therapy for HIV infection”, Gene Ther. 1(1):13-26.
[0212] 44. Zetsche et al. (2015) “Cpf1 is a single RNA-guided endonuclease of a class 2 CRIPSR-Cas system” Cell 163(3):759-71.
[0213] 45. Zuris et al. (2015) “Cationic lipid-mediated delivery of proteins enables efficient protein based genome editing in vitro and in vivo” Nat Biotechnol. 33(1):73-80.

1. A method for inactivating alleles of the Cytokine Inducible SH2 Containing Protein (CISH) gene in a cell, the method comprising
introducing to the cell a composition comprising:
at least one CRISPR nuclease, or a polynucleotide molecule encoding a CRISPR nuclease; and
an RNA molecule comprising a guide sequence portion, or a polynucleotide molecule encoding the RNA molecule,
wherein a complex of the CRISPR nuclease and the RNA molecule affects a double strand break in alleles of the CISH gene, and
wherein the guide sequence portion of the RNA molecule comprises 17-50 contiguous nucleotides containing nucleotides in the sequence set forth in any one of SEQ ID NOs: 1-6838.

2. (canceled)

3. The method of claim 1, wherein the cell is a lymphocyte, a T cell, a T regulatory cell, a B cell, a natural killer (NK) cell, a macrophage, a stem cell, or a fibroblast, blood cell, hepatocyte, keratinocyte, or any other cell type capable of being reprogrammed to an induced pluripotent stem cell (iPSC), or
wherein the cell is a hematopoietic stem cell (HSC), induced pluripotent stem cell (iPS cell), iPSc-derived cell, natural killer cell (NK), iPS-derived NK cell (INK), T cell, innate-like T cell (iT), natural killer T cell (NKT), γδ T cell, iPSc-derived T cell, invariant NKT cells (INKT), iPSc-derived NKT, monocyte, or macrophage.

4. (canceled)

5. (canceled)

6. The method of claim 1, wherein alleles of the CISH gene in the cell are subjected to an insertion or deletion mutation.

7. (canceled)

8. (canceled)

9. The method of claim 1, wherein the composition introduced to the cell further comprises a second RNA molecule comprising a guide sequence portion, wherein the guide sequence portion of the second RNA molecule comprises 17-50 contiguous nucleotides containing nucleotides in the sequence set forth in any one of SEQ ID NOs: 1-6838, wherein the guide sequence portion of the second RNA molecule differs from the guide sequence portion of the first RNA molecule.

10. A method for inactivating alleles of the Cytokine Inducible SH2 Containing Protein (CISH) gene in a cell, the method comprising
introducing to the cell a composition comprising:
at least one CRISPR nuclease, or a polynucleotide molecule encoding a CRISPR nuclease; and
an RNA molecule comprising a guide sequence portion, or a polynucleotide molecule encoding the RNA molecule,
wherein a complex of the CRISPR nuclease and the RNA molecule affects a double strand break in alleles of the CISH gene, and
wherein the guide sequence portion of the RNA molecule comprises 17-50 contiguous nucleotides containing nucleotides in the sequence set forth in any one of SEQ ID NOs: 1-6838 modified to contain 1, 2, 3, 4, or 5 nucleotide mismatches relative to a fully-complementary target sequence of the guide sequence portion.

11. (canceled)

12. The method of claim 10, wherein the guide sequence portion provides higher targeting specificity to the complex of the CRISPR nuclease and the RNA molecule relative to a guide sequence portion that has higher complementarity to an allele of the CISH gene.

13. The method of claim 10, wherein the composition introduced to the cell further comprises a second RNA molecule comprising a guide sequence portion, wherein the guide sequence portion of the RNA molecule comprises 17-50 contiguous nucleotides containing nucleotides in the sequence set forth in any one of SEQ ID NOs: 1-6838, or any one of SEQ ID NOs: 1-6838 modified to contain 1, 2, 3, 4, or 5 nucleotide mismatches relative to a fully-complementary target sequence of the guide sequence portion, wherein the guide sequence portion of the second RNA molecule differs from the guide sequence portion of the first RNA molecule.

14. A composition comprising:
at least one CRISPR nuclease, or a polynucleotide molecule encoding a CRISPR nuclease; and
an RNA molecule comprising a guide sequence portion, or a polynucleotide molecule encoding the RNA molecule,
wherein the guide sequence portion of the RNA molecule comprises 17-50 contiguous nucleotides containing nucleotides in the sequence set forth in any one of SEQ ID NOs: 1-6838 or in any one of SEQ ID NOs: 1-6838, modified to contain 1, 2, 3, 4, or 5 nucleotide mismatches relative to a fully target sequence of the guide sequence portion.

15. The composition of claim 14, further comprising a second RNA molecule which comprises a guide sequence portion comprising 17-50 contiguous nucleotides containing nucleotides in the sequence set forth in any one of SEQ ID NOs: 1-6838, or any one of SEQ ID NOs: 1-6838 modified to contain 1, 2, 3, 4, or 5 nucleotide mismatches relative to a fully-complementary target sequence of the guide sequence portion, wherein the guide sequence portion of the second RNA molecule differs from the guide sequence portion of the first RNA molecule.

16. (canceled)

17. (canceled)

18. (canceled)

19. (canceled)

20. A cell modified using the composition of claim 14.

21. (canceled)

22. (canceled)

23. The modified cell of claim 20, wherein the cell is a stem cell or any cell type capable of being reprogrammed to an induced pluripotent stem cell (iPSC).

24. (canceled)

25. (canceled)

26. (canceled)

27. Use of the composition of claim 14 for adoptive immunotherapy, comprising delivering the composition of claim 14, or a cell modified by the composition of claim 14, to a subject in need of adoptive immunotherapy.

28. (canceled)

29. (canceled)

30. (canceled)

31. (canceled)

32. (canceled)

33. A method of treating cancer, the method comprising delivering the composition of claim 14, or a cell modified by the composition of claim 14, to a subject in need of cancer treatment.

34. (canceled)

35. The method of claim 1, wherein the guide sequence portion of the RNA molecule further comprises 17-50 contiguous nucleotides containing nucleotides in the sequence set forth in any one of SEQ ID NOs: 658, 746, 2127, 2209, 4582, 5467, 6537, or 6831-6833.

36. The method of claim 35, wherein at least one CRISPR nuclease is OMNI-103.

37. The method of claim 10, wherein the guide sequence portion of the RNA molecule further comprises 17-50 contiguous nucleotides containing nucleotides in the sequence set forth in any one of SEQ ID NOs: 658, 746, 2127, 2209, 4582, 5467, 6537, or 6831-6833.

38. The method of claim 37, wherein at least one CRISPR nuclease is OMNI-103.

39. The composition of claim 14, wherein the guide sequence portion of the RNA molecule further comprises 17-50 contiguous nucleotides containing nucleotides in the sequence set forth in any one of SEQ ID NOs: 658, 746, 2127, 2209, 4582, 5467, 6537, or 6831-6833.

40. The composition of claim 39, wherein at least one CRISPR nuclease is OMNI-103.

The application's sequence listing, which the Patent Office published only in electronic form, follows.

SEQUENCE LISTING (6842 sequences)

SEQ ID NO: 1 - RNA, 20 nt, synthetic construct
  source 1..20: mol_type = other RNA
aaccagtgggcgcggagcgc

SEQ ID NO: 2 - RNA, 20 nt, synthetic construct
  source 1..20: mol_type = other RNA
aacgcagaggaccatgtccc

SEQ ID NO: 3 - RNA, 20 nt, synthetic construct
  source 1..20: mol_type = other RNA
aagcgcggctctctgccccc

SEQ ID NO: 4 - RNA, 20 nt, synthetic construct
  source 1..20: mol_type = other RNA
aagggggcagagagccgcgc

SEQ ID NO: 5 - RNA, 20 nt, synthetic construct
  source 1..20: mol_type = other RNA
acagggactgagaggcagtg

SEQ ID NO: 6 - RNA, 20 nt, synthetic construct
  source 1..20: mol_type = other RNA
acatggtcctctgcgttcag

SEQ ID NO: 7 - RNA, 20 nt, synthetic construct
  source 1..20: mol_type = other RNA
accagtgggcgcggagcgcg

SEQ ID NO: 8 - RNA, 20 nt, synthetic construct
  source 1..20: mol_type = other RNA
accatgtccccgcggcagcg

SEQ ID NO: 9 - RNA, 20 nt, synthetic construct
  source 1..20: mol_type = other RNA
acccagcacgcgctccgcgc

SEQ ID NO: 10 - RNA, 20 nt, synthetic construct
  source 1..20: mol_type = other RNA
acccctgaacgcagaggacc

SEQ ID NO: 11 - RNA, 20 nt, synthetic construct
  source 1..20: mol_type = other RNA
acgcagaggaccatgtcccc

SEQ ID NO: 12 - RNA, 20 nt, synthetic construct
  source 1..20: mol_type = other RNA
acgcgctccgcgcccactgg

SEQ ID NO: 13 - RNA, 20 nt, synthetic construct
  source 1..20: mol_type = other RNA
acggcggcggctggagggaa

SEQ ID NO: 14 - RNA, 20 nt, synthetic construct
  source 1..20: mol_type = other RNA
actccggagtcgccgctgcc

SEQ ID NO: 15 - RNA, 20 nt, synthetic construct
  source 1..20: mol_type = other RNA
actccggagtggggactcgg

SEQ ID NO: 16 - RNA, 20 nt, synthetic construct
  source 1..20: mol_type = other RNA
actcggctggacggcggcgg

SEQ ID NO: 17 - RNA, 20 nt, synthetic construct
  source 1..20: mol_type = other RNA
actgagaggcagtggcgcgg

SEQ ID NO: 18 - RNA, 20 nt, synthetic construct
  source 1..20: mol_type = other RNA
actgcctctcagtccctgtc

SEQ ID NO: 19 - RNA, 20 nt, synthetic construct
  source 1..20: mol_type = other RNA
actggttccctccagccgcc

SEQ ID NO: 20 - RNA, 20 nt, synthetic construct
  source 1..20: mol_type = other RNA
agagagccgcgcttacccct

SEQ ID NO: 21 - RNA, 20 nt, synthetic construct
  source 1..20: mol_type = other RNA
agagccgcgcttacccctga

SEQ ID NO: 22 - RNA, 20 nt, synthetic construct
  source 1..20: mol_type = other RNA
agaggaccatgtccccgcgg

SEQ ID NO: 23 - RNA, 20 nt, synthetic construct
  source 1..20: mol_type = other RNA
agaggcagtggcgcggaccg

SEQ ID NO: 24 - RNA, 20 nt, synthetic construct
  source 1..20: mol_type = other RNA
agcacgcgctccgcgcccac

SEQ ID NO: 25 - RNA, 20 nt, synthetic construct
  source 1..20: mol_type = other RNA
agccgagtccccactccgga

SEQ ID NO: 26 - RNA, 20 nt, synthetic construct
  source 1..20: mol_type = other RNA
agccgccgccgtccagccga

SEQ ID NO: 27 - RNA, 20 nt, synthetic construct
  source 1..20: mol_type = other RNA
agccgcgcttacccctgaac

SEQ ID NO: 28 - RNA, 20 nt, synthetic construct
  source 1..20: mol_type = other RNA
agcctacccagcacgcgctc

SEQ ID NO: 29 - RNA, 20 nt, synthetic construct
  source 1..20: mol_type = other RNA
agcgcggctctctgccccct

SEQ ID NO: 30 - RNA, 20 nt, synthetic construct
  source 1..20: mol_type = other RNA
agcgcgtgctgggtaggctc

SEQ ID NO: 31 - RNA, 20 nt, synthetic construct
  source 1..20: mol_type = other RNA
agcggcgactccggagtggg

SEQ ID NO: 32 - RNA, 20 nt, synthetic construct
  source 1..20: mol_type = other RNA
aggacagggactgagaggca

SEQ ID NO: 33 - RNA, 20 nt, synthetic construct
  source 1..20: mol_type = other RNA
aggaccatgtccccgcggca

SEQ ID NO: 34 - RNA, 20 nt, synthetic construct
  source 1..20: mol_type = other RNA
aggcagtggcgcggaccgcc

SEQ ID NO: 35 - RNA, 20 nt, synthetic construct
  source 1..20: mol_type = other RNA
aggcggtccgcgccactgcc

SEQ ID NO: 36 - RNA, 20 nt, synthetic construct
  source 1..20: mol_type = other RNA
agggaaccagtgggcgcgga

SEQ ID NO: 37 - RNA, 20 nt, synthetic construct
  source 1..20: mol_type = other RNA
agggactgagaggcagtggc

SEQ ID NO: 38 - RNA, 20 nt, synthetic construct
  source 1..20: mol_type = other RNA
agggggcagagagccgcgct

SEQ ID NO: 39 - RNA, 20 nt, synthetic construct
  source 1..20: mol_type = other RNA
aggggtaagcgcggctctct

SEQ ID NO: 40 - RNA, 20 nt, synthetic construct
  source 1..20: mol_type = other RNA
agtccccactccggagtcgc

SEQ ID NO: 41 - RNA, 20 nt, synthetic construct
  source 1..20: mol_type = other RNA
agtccctgtcctgcgcccgc

SEQ ID NO: 42 - RNA, 20 nt, synthetic construct
  source 1..20: mol_type = other RNA
agtcgccgctgccgcgggga

SEQ ID NO: 43 - RNA, 20 nt, synthetic construct
  source 1..20: mol_type = other RNA
agtgggcgcggagcgcgtgc

SEQ ID NO: 44 - RNA, 20 nt, synthetic construct
  source 1..20: mol_type = other RNA
agtggggactcggctggacg

SEQ ID NO: 45 - RNA, 20 nt, synthetic construct
  source 1..20: mol_type = other RNA
atggtcctctgcgttcaggg

SEQ ID NO: 46 - RNA, 20 nt, synthetic construct
  source 1..20: mol_type = other RNA
atgtccccgcggcagcggcg

SEQ ID NO: 47 - RNA, 20 nt, synthetic construct
  source 1..20: mol_type = other RNA
cacgcgctccgcgcccactg

SEQ ID NO: 48 - RNA, 20 nt, synthetic construct
  source 1..20: mol_type = other RNA
cactccggagtcgccgctgc

SEQ ID NO: 49 - RNA, 20 nt, synthetic construct
  source 1..20: mol_type = other RNA
cactgcctctcagtccctgt

SEQ ID NO: 50 - RNA, 20 nt, synthetic construct
  source 1..20: mol_type = other RNA
cactggttccctccagccgc

SEQ ID NO: 51 - RNA, 20 nt, synthetic construct
  source 1..20: mol_type = other RNA
cagagagccgcgcttacccc

SEQ ID NO: 52 - RNA, 20 nt, synthetic construct
  source 1..20: mol_type = other RNA
cagaggaccatgtccccgcg

SEQ ID NO: 53 - RNA, 20 nt, synthetic construct
  source 1..20: mol_type = other RNA
cagcacgcgctccgcgccca

SEQ ID NO: 54 - RNA, 20 nt, synthetic construct
  source 1..20: mol_type = other RNA
cagccgagtccccactccgg

SEQ ID NO: 55 - RNA, 20 nt, synthetic construct
  source 1..20: mol_type = other RNA
cagcggcgactccggagtgg

SEQ ID NO: 56 - RNA, 20 nt, synthetic construct
  source 1..20: mol_type = other RNA
caggacagggactgagaggc

SEQ ID NO: 57 - RNA, 20 nt, synthetic construct
  source 1..20: mol_type = other RNA
caggcggtccgcgccactgc

SEQ ID NO: 58 - RNA, 20 nt, synthetic construct
  source 1..20: mol_type = other RNA
cagggactgagaggcagtgg

SEQ ID NO: 59 - RNA, 20 nt, synthetic construct
  source 1..20: mol_type = other RNA
caggggtaagcgcggctctc

SEQ ID NO: 60 - RNA, 20 nt, synthetic construct
  source 1..20: mol_type = other RNA
cagtccctgtcctgcgcccg

SEQ ID NO: 61 - RNA, 20 nt, synthetic construct
  source 1..20: mol_type = other RNA
cagtgggcgcggagcgcgtg

SEQ ID NO: 62 - RNA, 20 nt, synthetic construct
  source 1..20: mol_type = other RNA
catggtcctctgcgttcagg

SEQ ID NO: 63 - RNA, 20 nt, synthetic construct
  source 1..20: mol_type = other RNA
catgtccccgcggcagcggc

SEQ ID NO: 64 - RNA, 20 nt, synthetic construct
  source 1..20: mol_type = other RNA
ccactccggagtcgccgctg

SEQ ID NO: 65 - RNA, 20 nt, synthetic construct
  source 1..20: mol_type = other RNA
ccactgcctctcagtccctg

SEQ ID NO: 66 - RNA, 20 nt, synthetic construct
  source 1..20: mol_type = other RNA
ccactggttccctccagccg

SEQ ID NO: 67 - RNA, 20 nt, synthetic construct
  source 1..20: mol_type = other RNA
ccagccgagtccccactccg

SEQ ID NO: 68 - RNA, 20 nt, synthetic construct
  source 1..20: mol_type = other RNA
ccagtgggcgcggagcgcgt

SEQ ID NO: 69 - RNA, 20 nt, synthetic construct
  source 1..20: mol_type = other RNA
ccatgtccccgcggcagcgg

SEQ ID NO: 70 - RNA, 20 nt, synthetic construct
  source 1..20: mol_type = other RNA
cccactccggagtcgccgct

SEQ ID NO: 71 - RNA, 20 nt, synthetic construct
  source 1..20: mol_type = other RNA
cccactggttccctccagcc

SEQ ID NO: 72 - RNA, 20 nt, synthetic construct
  source 1..20: mol_type = other RNA
ccccactccggagtcgccgc

SEQ ID NO: 73 - RNA, 20 nt, synthetic construct
  source 1..20: mol_type = other RNA
ccccgggagcctacccagca

SEQ ID NO: 74 - RNA, 20 nt, synthetic construct
  source 1..20: mol_type = other RNA
cccctgaacgcagaggacca

SEQ ID NO: 75 - RNA, 20 nt, synthetic construct
  source 1..20: mol_type = other RNA
cccgggagcctacccagcac

SEQ ID NO: 76 - RNA, 20 nt, synthetic construct
  source 1..20: mol_type = other RNA
ccctgaacgcagaggaccat

SEQ ID NO: 77 - RNA, 20 nt, synthetic construct
  source 1..20: mol_type = other RNA
ccgagtccccactccggagt

SEQ ID NO: 78 - RNA, 20 nt, synthetic construct
  source 1..20: mol_type = other RNA
ccgccgccgtccagccgagt

SEQ ID NO: 79 - RNA, 20 nt, synthetic construct
  source 1..20: mol_type = other RNA
ccgccgtccagccgagtccc

SEQ ID NO: 80 - RNA, 20 nt, synthetic construct
  source 1..20: mol_type = other RNA
ccgcgccactgcctctcagt

SEQ ID NO: 81 - RNA, 20 nt, synthetic construct
  source 1..20: mol_type = other RNA
ccgcgcccactggttccctc

SEQ ID NO: 82 - RNA, 20 nt, synthetic construct
  source 1..20: mol_type = other RNA
ccgcgcttacccctgaacgc

SEQ ID NO: 83 - RNA, 20 nt, synthetic construct
  source 1..20: mol_type = other RNA
ccgcggggacatggtcctct

SEQ ID NO: 84 - RNA, 20 nt, synthetic construct
  source 1..20: mol_type = other RNA
ccgctgccgcggggacatgg

SEQ ID NO: 85 - RNA, 20 nt, synthetic construct
  source 1..20: mol_type = other RNA
ccggagtggggactcggctg

SEQ ID NO: 86 - RNA, 20 nt, synthetic construct
  source 1..20: mol_type = other RNA
ccgggaagggggcagagagc

SEQ ID NO: 87 - RNA, 20 nt, synthetic construct
  source 1..20: mol_type = other RNA
ccgggagcctacccagcacg

SEQ ID NO: 88 - RNA, 20 nt, synthetic construct
  source 1..20: mol_type = other RNA
ccgtccagccgagtccccac

SEQ ID NO: 89 - RNA, 20 nt, synthetic construct
  source 1..20: mol_type = other RNA
cctacccagcacgcgctccg

SEQ ID NO: 90 - RNA, 20 nt, synthetic construct
  source 1..20: mol_type = other RNA
cctccagccgccgccgtcca

SEQ ID NO: 91 - RNA, 20 nt, synthetic construct
  source 1..20: mol_type = other RNA
cctctcagtccctgtcctgc

SEQ ID NO: 92 - RNA, 20 nt, synthetic construct
  source 1..20: mol_type = other RNA
cctctgcgttcaggggtaag

SEQ ID NO: 93 - RNA, 20 nt, synthetic construct
  source 1..20: mol_type = other RNA
cctgaacgcagaggaccatg

SEQ ID NO: 94 - RNA, 20 nt, synthetic construct
  source 1..20: mol_type = other RNA
cgactccggagtggggactc

SEQ ID NO: 95 - RNA, 20 nt, synthetic construct
  source 1..20: mol_type = other RNA
cgagtccccactccggagtc

SEQ ID NO: 96 - RNA, 20 nt, synthetic construct
  source 1..20: mol_type = other RNA
cgcagaggaccatgtccccg

SEQ ID NO: 97 - RNA, 20 nt, synthetic construct
  source 1..20: mol_type = other RNA
cgcaggacagggactgagag

SEQ ID NO: 98 - RNA, 20 nt, synthetic construct
  source 1..20: mol_type = other RNA
cgcaggcggtccgcgccact

SEQ ID NO: 99 - RNA, 20 nt, synthetic construct
  source 1..20: mol_type = other RNA
cgccactgcctctcagtccc

SEQ ID NO: 100 - RNA, 20 nt, synthetic construct
  source 1..20: mol_type = other RNA
cgcccactggttccctccag

SEQ ID NO: 101 - RNA, 20 nt, synthetic construct
  source 1..20: mol_type = other RNA
cgccccgggagcctacccag

SEQ ID NO: 102 - RNA, 20 nt, synthetic construct
  source 1..20: mol_type = other RNA
cgccgccgtccagccgagtc

SEQ ID NO: 103 - RNA, 20 nt, synthetic construct
  source 1..20: mol_type = other RNA
cgccgctgccgcggggacat

SEQ ID NO: 104 - RNA, 20 nt, synthetic construct
  source 1..20: mol_type = other RNA
cgccgtccagccgagtcccc

SEQ ID NO: 105 - RNA, 20 nt, synthetic construct
  source 1..20: mol_type = other RNA
cgcgccactgcctctcagtc

SEQ ID NO: 106 - RNA, 20 nt, synthetic construct
  source 1..20: mol_type = other RNA
cgcgcccactggttccctcc

SEQ ID NO: 107 - RNA, 20 nt, synthetic construct
  source 1..20: mol_type = other RNA
cgcgctccgcgcccactggt

SEQ ID NO: 108 - RNA, 20 nt, synthetic construct
  source 1..20: mol_type = other RNA
cgcgcttacccctgaacgca

SEQ ID NO: 109 - RNA, 20 nt, synthetic construct
  source 1..20: mol_type = other RNA
cgcggagcgcgtgctgggta

SEQ ID NO: 110 - RNA, 20 nt, synthetic construct
  source 1..20: mol_type = other RNA
cgcgggcgcaggacagggac

SEQ ID NO: 111 - RNA, 20 nt, synthetic construct
  source 1..20: mol_type = other RNA
cgcggggacatggtcctctg

SEQ ID NO: 112 - RNA, 20 nt, synthetic construct
  source 1..20: mol_type = other RNA
cgcgtgctgggtaggctccc

SEQ ID NO: 113 - RNA, 20 nt, synthetic construct
  source 1..20: mol_type = other RNA
cgctccgcgcccactggttc

SEQ ID NO: 114 - RNA, 20 nt, synthetic construct
  source 1..20: mol_type = other RNA
cgctgccgcggggacatggt

SEQ ID NO: 115 - RNA, 20 nt, synthetic construct
  source 1..20: mol_type = other RNA
cgcttacccctgaacgcaga

SEQ ID NO: 116 - RNA, 20 nt, synthetic construct
  source 1..20: mol_type = other RNA
cggagcgcgtgctgggtagg

SEQ ID NO: 117 - RNA, 20 nt, synthetic construct
  source 1..20: mol_type = other RNA
cggagtggggactcggctgg

SEQ ID NO: 118 - RNA, 20 nt, synthetic construct
  source 1..20: mol_type = other RNA
cggcagcggcgactccggag

SEQ ID NO: 119 - RNA, 20 nt, synthetic construct
  source 1..20: mol_type = other RNA
cggcgactccggagtgggga

SEQ ID NO: 120 - RNA, 20 nt, synthetic construct
  source 1..20: mol_type = other RNA
cggcggcggctggagggaac

SEQ ID NO: 121 - RNA, 20 nt, synthetic construct
  source 1..20: mol_type = other RNA
cggcggctggagggaaccag

SEQ ID NO: 122 - RNA, 20 nt, synthetic construct
  source 1..20: mol_type = other RNA
cggctggagggaaccagtgg

SEQ ID NO: 123 - RNA, 20 nt, synthetic construct
  source 1..20: mol_type = other RNA
cgggaagggggcagagagcc

SEQ ID NO: 124 - RNA, 20 nt, synthetic construct
  source 1..20: mol_type = other RNA
cgggagcctacccagcacgc

SEQ ID NO: 125 - RNA, 20 nt, synthetic construct
  source 1..20: mol_type = other RNA
cgggcgcaggacagggactg

SEQ ID NO: 126 - RNA, 20 nt, synthetic construct
  source 1..20: mol_type = other RNA
cggggacatggtcctctgcg

SEQ ID NO: 127 - RNA, 20 nt, synthetic construct
  source 1..20: mol_type = other RNA
cggtccgcgccactgcctct

SEQ ID NO: 128 - RNA, 20 nt, synthetic construct
  source 1..20: mol_type = other RNA
cgtccagccgagtccccact

SEQ ID NO: 129 - RNA, 20 nt, synthetic construct
  source 1..20: mol_type = other RNA
cgtgctgggtaggctcccgg

SEQ ID NO: 130 - RNA, 20 nt, synthetic construct
  source 1..20: mol_type = other RNA
cgttcaggggtaagcgcggc

SEQ ID NO: 131 - RNA, 20 nt, synthetic construct
  source 1..20: mol_type = other RNA
ctacccagcacgcgctccgc

SEQ ID NO: 132 - RNA, 20 nt, synthetic construct
  source 1..20: mol_type = other RNA
ctcagtccctgtcctgcgcc

SEQ ID NO: 133 - RNA, 20 nt, synthetic construct
  source 1..20: mol_type = other RNA
ctccagccgccgccgtccag

SEQ ID NO: 134 - RNA, 20 nt, synthetic construct
  source 1..20: mol_type = other RNA
ctccgcgcccactggttccc

SEQ ID NO: 135 - RNA, 20 nt, synthetic construct
  source 1..20: mol_type = other RNA
ctccggagtcgccgctgccg

SEQ ID NO: 136 - RNA, 20 nt, synthetic construct
  source 1..20: mol_type = other RNA
ctccggagtggggactcggc

SEQ ID NO: 137 - RNA, 20 nt, synthetic construct
  source 1..20: mol_type = other RNA
ctcgcaggcggtccgcgcca

SEQ ID NO: 138 - RNA, 20 nt, synthetic construct
  source 1..20: mol_type = other RNA
ctctcagtccctgtcctgcg

SEQ ID NO: 139 - RNA, 20 nt, synthetic construct
  source 1..20: mol_type = other RNA
ctctgcgttcaggggtaagc

SEQ ID NO: 140 - RNA, 20 nt, synthetic construct
  source 1..20: mol_type = other RNA
ctgaacgcagaggaccatgt

SEQ ID NO: 141 - RNA, 20 nt, synthetic construct
  source 1..20: mol_type = other RNA
ctgagaggcagtggcgcgga

SEQ ID NO: 142 - RNA, 20 nt, synthetic construct
  source 1..20: mol_type = other RNA
ctgccgcggggacatggtcc

SEQ ID NO: 143 - RNA, 20 nt, synthetic construct
  source 1..20: mol_type = other RNA
ctgcctctcagtccctgtcc

SEQ ID NO: 144 - RNA, 20 nt, synthetic construct
  source 1..20: mol_type = other RNA
ctgcgttcaggggtaagcgc

SEQ ID NO: 145 - RNA, 20 nt, synthetic construct
  source 1..20: mol_type = other RNA
ctggacggcggcggctggag

SEQ ID NO: 146 - RNA, 20 nt, synthetic construct
  source 1..20: mol_type = other RNA
ctggagggaaccagtgggcg

SEQ ID NO: 147 - RNA, 20 nt, synthetic construct
  source 1..20: mol_type = other RNA
ctgggtaggctcccggggcg

SEQ ID NO: 148 - RNA, 20 nt, synthetic construct
  source 1..20: mol_type = other RNA
ctggttccctccagccgccg

SEQ ID NO: 149 - RNA, 20 nt, synthetic construct
  source 1..20: mol_type = other RNA
cttacccctgaacgcagagg

SEQ ID NO: 150 - RNA, 20 nt, synthetic construct
  source 1..20: mol_type = other RNA
gaaccagtgggcgcggagcg

SEQ ID NO: 151 - RNA, 20 nt, synthetic construct
  source 1..20: mol_type = other RNA
gaacgcagaggaccatgtcc

SEQ ID NO: 152 - RNA, 20 nt, synthetic construct
  source 1..20: mol_type = other RNA
gaagggggcagagagccgcg

SEQ ID NO: 153 - RNA, 20 nt, synthetic construct
  source 1..20: mol_type = other RNA
gacagggactgagaggcagt

SEQ ID NO: 154 - RNA, 20 nt, synthetic construct
  source 1..20: mol_type = other RNA
gacatggtcctctgcgttca

SEQ ID NO: 155 - RNA, 20 nt, synthetic construct
  source 1..20: mol_type = other RNA
gaccatgtccccgcggcagc

SEQ ID NO: 156 - RNA, 20 nt, synthetic construct
  source 1..20: mol_type = other RNA
gacggcggcggctggaggga

SEQ ID NO: 157 - RNA, 20 nt, synthetic construct
  source 1..20: mol_type = other RNA
gactccggagtggggactcg

SEQ ID NO: 158 - RNA, 20 nt, synthetic construct
  source 1..20: mol_type = other RNA
gactcggctggacggcggcg

SEQ ID NO: 159 - RNA, 20 nt, synthetic construct
  source 1..20: mol_type = other RNA
gactgagaggcagtggcgcg

SEQ ID NO: 160 - RNA, 20 nt, synthetic construct
  source 1..20: mol_type = other RNA
gagagccgcgcttacccctg

SEQ ID NO: 161 - RNA, 20 nt, synthetic construct
  source 1..20: mol_type = other RNA
gagaggcagtggcgcggacc

SEQ ID NO: 162 - RNA, 20 nt, synthetic construct
  source 1..20: mol_type = other RNA
gagccgcgcttacccctgaa

SEQ ID NO: 163 - RNA, 20 nt, synthetic construct
  source 1..20: mol_type = other RNA
gagcctacccagcacgcgct

SEQ ID NO: 164 - RNA, 20 nt, synthetic construct
  source 1..20: mol_type = other RNA
gagcgcgtgctgggtaggct

SEQ ID NO: 165 - RNA, 20 nt, synthetic construct
  source 1..20: mol_type = other RNA
gaggaccatgtccccgcggc

SEQ ID NO: 166 - RNA, 20 nt, synthetic construct
  source 1..20: mol_type = other RNA
gaggcagtggcgcggaccgc

SEQ ID NO: 167 - RNA, 20 nt, synthetic construct
  source 1..20: mol_type = other RNA
gagggaaccagtgggcgcgg

SEQ ID NO: 168 - RNA, 20 nt, synthetic construct
  source 1..20: mol_type = other RNA
gagtccccactccggagtcg

SEQ ID NO: 169 - RNA, 20 nt, synthetic construct
  source 1..20: mol_type = other RNA
gagtggggactcggctggac

SEQ ID NO: 170 - RNA, 20 nt, synthetic construct
  source 1..20: mol_type = other RNA
gcacgcgctccgcgcccact

SEQ ID NO: 171 - RNA, 20 nt, synthetic construct
  source 1..20: mol_type = other RNA
gcagagagccgcgcttaccc

SEQ ID NO: 172 - RNA, 20 nt, synthetic construct
  source 1..20: mol_type = other RNA
gcagaggaccatgtccccgc

SEQ ID NO: 173 - RNA, 20 nt, synthetic construct
  source 1..20: mol_type = other RNA
gcagcggcgactccggagtg

SEQ ID NO: 174 - RNA, 20 nt, synthetic construct
  source 1..20: mol_type = other RNA
gcaggacagggactgagagg

SEQ ID NO: 175 - RNA, 20 nt, synthetic construct
  source 1..20: mol_type = other RNA
gcaggcggtccgcgccactg

SEQ ID NO: 176 - RNA, 20 nt, synthetic construct
  source 1..20: mol_type = other RNA
gccactgcctctcagtccct

SEQ ID NO: 177 - RNA, 20 nt, synthetic construct
  source 1..20: mol_type = other RNA
gcccactggttccctccagc

SEQ ID NO: 178 - RNA, 20 nt, synthetic construct
  source 1..20: mol_type = other RNA
gccccgggagcctacccagc

SEQ ID NO: 179 - RNA, 20 nt, synthetic construct
  source 1..20: mol_type = other RNA
gccgagtccccactccggag

SEQ ID NO: 180 - RNA, 20 nt, synthetic construct
  source 1..20: mol_type = other RNA
gccgccgtccagccgagtcc

SEQ ID NO: 181 - RNA, 20 nt, synthetic construct
  source 1..20: mol_type = other RNA
gccgcgcttacccctgaacg

SEQ ID NO: 182 - RNA, 20 nt, synthetic construct
  source 1..20: mol_type = other RNA
gccgcggggacatggtcctc

SEQ ID NO: 183 - RNA, 20 nt, synthetic construct
  source 1..20: mol_type = other RNA
gccgctgccgcggggacatg

SEQ ID NO: 184 - RNA, 20 nt, synthetic construct
  source 1..20: mol_type = other RNA
gccgggaagggggcagagag

SEQ ID NO: 185 - RNA, 20 nt, synthetic construct
  source 1..20: mol_type = other RNA
gccgtccagccgagtcccca

SEQ ID NO: 186 - RNA, 20 nt, synthetic construct
  source 1..20: mol_type = other RNA
gcctacccagcacgcgctcc

SEQ ID NO: 187 - RNA, 20 nt, synthetic construct
  source 1..20: mol_type = other RNA
gcctctcagtccctgtcctg

SEQ ID NO: 188 - RNA, 20 nt, synthetic construct
  source 1..20: mol_type = other RNA
gcgactccggagtggggact

SEQ ID NO: 189 - RNA, 20 nt, synthetic construct
  source 1..20: mol_type = other RNA
gcgcaggacagggactgaga

SEQ ID NO: 190 - RNA, 20 nt, synthetic construct
  source 1..20: mol_type = other RNA
gcgccactgcctctcagtcc

SEQ ID NO: 191 - RNA, 20 nt, synthetic construct
  source 1..20: mol_type = other RNA
gcgcccactggttccctcca

SEQ ID NO: 192 - RNA, 20 nt, synthetic construct
  source 1..20: mol_type = other RNA
gcgccccgggagcctaccca

SEQ ID NO: 193 - RNA, 20 nt, synthetic construct
  source 1..20: mol_type = other RNA
gcgcggagcgcgtgctgggt

SEQ ID NO: 194 - RNA, 20 nt, synthetic construct
  source 1..20: mol_type = other RNA
gcgcggctctctgccccctt

SEQ ID NO: 195 - RNA, 20 nt, synthetic construct
  source 1..20: mol_type = other RNA
gcgcgggcgcaggacaggga

SEQ ID NO: 196 - RNA, 20 nt, synthetic construct
  source 1..20: mol_type = other RNA
gcgcgtgctgggtaggctcc

SEQ ID NO: 197 - RNA, 20 nt, synthetic construct
  source 1..20: mol_type = other RNA
gcgctccgcgcccactggtt

SEQ ID NO: 198 - RNA, 20 nt, synthetic construct
  source 1..20: mol_type = other RNA
gcgcttacccctgaacgcag

SEQ ID NO: 199 - RNA, 20 nt, synthetic construct
  source 1..20: mol_type = other RNA
gcggagcgcgtgctgggtag

SEQ ID NO: 200 - RNA, 20 nt, synthetic construct
  source 1..20: mol_type = other RNA
gcggcagcggcgactccgga

SEQ ID NO: 201 - RNA, 20 nt, synthetic construct
  source 1..20: mol_type = other RNA
gcggcgactccggagtgggg

SEQ ID NO: 202 - RNA, 20 nt, synthetic construct
  source 1..20: mol_type = other RNA
gcggcggctggagggaacca

SEQ ID NO: 203 - RNA, 20 nt, synthetic construct
  source 1..20: mol_type = other RNA
gcggctggagggaaccagtg

SEQ ID NO: 204 - RNA, 20 nt, synthetic construct
  source 1..20: mol_type = other RNA
gcgggcgcaggacagggact

SEQ ID NO: 205 - RNA, 20 nt, synthetic construct
  source 1..20: mol_type = other RNA
gcggggacatggtcctctgc

SEQ ID NO: 206 - RNA, 20 nt, synthetic construct
  source 1..20: mol_type = other RNA
gcggtccgcgccactgcctc

SEQ ID NO: 207 - RNA, 20 nt, synthetic construct
  source 1..20: mol_type = other RNA
gcgtgctgggtaggctcccg

SEQ ID NO: 208 - RNA, 20 nt, synthetic construct
  source 1..20: mol_type = other RNA
gcgttcaggggtaagcgcgg

SEQ ID NO: 209 - RNA, 20 nt, synthetic construct
  source 1..20: mol_type = other RNA
gctccgcgcccactggttcc

SEQ ID NO: 210 - RNA, 20 nt, synthetic construct
  source 1..20: mol_type = other RNA
gctgccgcggggacatggtc

SEQ ID NO: 211 - RNA, 20 nt, synthetic construct
  source 1..20: mol_type = other RNA
gctggacggcggcggctgga

SEQ ID NO: 212 - RNA, 20 nt, synthetic construct
  source 1..20: mol_type = other RNA
gctggagggaaccagtgggc

SEQ ID NO: 213 - RNA, 20 nt, synthetic construct
  source 1..20: mol_type = other RNA
gctgggtaggctcccggggc

SEQ ID NO: 214 - RNA, 20 nt, synthetic construct
  source 1..20: mol_type = other RNA
gcttacccctgaacgcagag

SEQ ID NO: 215 - RNA, 20 nt, synthetic construct
  source 1..20: mol_type = other RNA
ggaaccagtgggcgcggagc

SEQ ID NO: 216 - RNA, 20 nt, synthetic construct
  source 1..20: mol_type = other RNA
ggaagggggcagagagccgc

SEQ ID NO: 217 - RNA, 20 nt, synthetic construct
  source 1..20: mol_type = other RNA
ggacagggactgagaggcag

SEQ ID NO: 218 - RNA, 20 nt, synthetic construct
  source 1..20: mol_type = other RNA
ggacatggtcctctgcgttc

SEQ ID NO: 219 - RNA, 20 nt, synthetic construct
  source 1..20: mol_type = other RNA
ggaccatgtccccgcggcag

SEQ ID NO: 220 - RNA, 20 nt, synthetic construct
  source 1..20: mol_type = other RNA
ggactcggctggacggcggc

SEQ ID NO: 221 - RNA, 20 nt, synthetic construct
  source 1..20: mol_type = other RNA
ggactgagaggcagtggcgc

SEQ ID NO: 222 - RNA, 20 nt, synthetic construct
  source 1..20: mol_type = other RNA
ggagcctacccagcacgcgc

SEQ ID NO: 223 - RNA, 20 nt, synthetic construct
  source 1..20: mol_type = other RNA
ggagcgcgtgctgggtaggc

SEQ ID NO: 224 - RNA, 20 nt, synthetic construct
  source 1..20: mol_type = other RNA
ggagggaaccagtgggcgcg

SEQ ID NO: 225 - RNA, 20 nt, synthetic construct
  source 1..20: mol_type = other RNA
ggagtggggactcggctgga

SEQ ID NO: 226 - RNA, 20 nt, synthetic construct
  source 1..20: mol_type = other RNA
ggcagagagccgcgcttacc

SEQ ID NO: 227 - RNA, 20 nt, synthetic construct
  source 1..20: mol_type = other RNA
ggcagcggcgactccggagt

SEQ ID NO: 228 - RNA, 20 nt, synthetic construct
  source 1..20: mol_type = other RNA
ggccgggaagggggcagaga

SEQ ID NO: 229 - RNA, 20 nt, synthetic construct
  source 1..20: mol_type = other RNA
ggcgactccggagtggggac

SEQ ID NO: 230 - RNA, 20 nt, synthetic construct
  source 1..20: mol_type = other RNA
ggcgcaggacagggactgag

SEQ ID NO: 231 - RNA, 20 nt, synthetic construct
  source 1..20: mol_type = other RNA
ggcggcggctggagggaacc

SEQ ID NO: 232 - RNA, 20 nt, synthetic construct
  source 1..20: mol_type = other RNA
ggcggctggagggaaccagt

SEQ ID NO: 233 - RNA, 20 nt, synthetic construct
  source 1..20: mol_type = other RNA
ggcggtccgcgccactgcct

SEQ ID NO: 234 - RNA, 20 nt, synthetic construct
  source 1..20: mol_type = other RNA
ggctggagggaaccagtggg

SEQ ID NO: 235 - RNA, 20 nt, synthetic construct
  source 1..20: mol_type = other RNA
gggaaccagtgggcgcggag

SEQ ID NO: 236 - RNA, 20 nt, synthetic construct
  source 1..20: mol_type = other RNA
gggaagggggcagagagccg

SEQ ID NO: 237 - RNA, 20 nt, synthetic construct
  source 1..20: mol_type = other RNA
gggacatggtcctctgcgtt

SEQ ID NO: 238 - RNA, 20 nt, synthetic construct
  source 1..20: mol_type = other RNA
gggactcggctggacggcgg

SEQ ID NO: 239 - RNA, 20 nt, synthetic construct
  source 1..20: mol_type = other RNA
gggactgagaggcagtggcg

SEQ ID NO: 240 - RNA, 20 nt, synthetic construct
  source 1..20: mol_type = other RNA
gggagcctacccagcacgcg

SEQ ID NO: 241 - RNA, 20 nt, synthetic construct
  source 1..20: mol_type = other RNA
gggcagagagccgcgcttac

SEQ ID NO: 242 - RNA, 20 nt, synthetic construct
  source 1..20: mol_type = other RNA
gggcgcaggacagggactga

SEQ ID NO: 243 - RNA, 20 nt, synthetic construct
  source 1..20: mol_type = other RNA
ggggacatggtcctctgcgt

SEQ ID NO: 244 - RNA, 20 nt, synthetic construct
  source 1..20: mol_type = other RNA
ggggactcggctggacggcg

SEQ ID NO: 245 - RNA, 20 nt, synthetic construct
  source 1..20: mol_type = other RNA
ggggcagagagccgcgctta

SEQ ID NO: 246 - RNA, 20 nt, synthetic construct
  source 1..20: mol_type = other RNA
gggggcagagagccgcgctt

SEQ ID NO: 247 - RNA, 20 nt, synthetic construct
  source 1..20: mol_type = other RNA
ggggtaagcgcggctctctg

SEQ ID NO: 248 - RNA, 20 nt, synthetic construct
  source 1..20: mol_type = other RNA
gggtaagcgcggctctctgc

SEQ ID NO: 249 - RNA, 20 nt, synthetic construct
  source 1..20: mol_type = other RNA
ggtaagcgcggctctctgcc

SEQ ID NO: 250 - RNA, 20 nt, synthetic construct
  source 1..20: mol_type = other RNA
ggtccgcgccactgcctctc

SEQ ID NO: 251 - RNA, 20 nt, synthetic construct
  source 1..20: mol_type = other RNA
ggtcctctgcgttcaggggt

SEQ ID NO: 252 - RNA, 20 nt, synthetic construct
  source 1..20: mol_type = other RNA
ggttccctccagccgccgcc

SEQ ID NO: 253 - RNA, 20 nt, synthetic construct
  source 1..20: mol_type = other RNA
gtaagcgcggctctctgccc

SEQ ID NO: 254 - RNA, 20 nt, synthetic construct
  source 1..20: mol_type = other RNA
gtccagccgagtccccactc

SEQ ID NO: 255 - RNA, 20 nt, synthetic construct
  source 1..20: mol_type = other RNA
gtccccactccggagtcgcc

SEQ ID NO: 256 - RNA, 20 nt, synthetic construct
  source 1..20: mol_type = other RNA
gtccctgtcctgcgcccgcg

SEQ ID NO: 257 - RNA, 20 nt, synthetic construct
  source 1..20: mol_type = other RNA
gtccgcgccactgcctctca

SEQ ID NO: 258 - RNA, 20 nt, synthetic construct
  source 1..20: mol_type = other RNA
gtcctctgcgttcaggggta

SEQ ID NO: 259 - RNA, 20 nt, synthetic construct
  source 1..20: mol_type = other RNA
gtgctgggtaggctcccggg

SEQ ID NO: 260 - RNA, 20 nt, synthetic construct
  source 1..20: mol_type = other RNA
gtgggcgcggagcgcgtgct

SEQ ID NO: 261 - RNA, 20 nt, synthetic construct
  source 1..20: mol_type = other RNA
gtggggactcggctggacgg

SEQ ID NO: 262 - RNA, 20 nt, synthetic construct
  source 1..20: mol_type = other RNA
gttcaggggtaagcgcggct

SEQ ID NO: 263 - RNA, 20 nt, synthetic construct
  source 1..20: mol_type = other RNA
gttccctccagccgccgccg

SEQ ID NO: 264 - RNA, 20 nt, synthetic construct
  source 1..20: mol_type = other RNA
taagcgcggctctctgcccc

SEQ ID NO: 265 - RNA, 20 nt, synthetic construct
  source 1..20: mol_type = other RNA
tacccagcacgcgctccgcg

SEQ ID NO: 266 - RNA, 20 nt, synthetic construct
  source 1..20: mol_type = other RNA
tacccctgaacgcagaggac

SEQ ID NO: 267 - RNA, 20 nt, synthetic construct
  source 1..20: mol_type = other RNA
tcaggggtaagcgcggctct

SEQ ID NO: 268 - RNA, 20 nt, synthetic construct
  source 1..20: mol_type = other RNA
tcagtccctgtcctgcgccc

SEQ ID NO: 269 - RNA, 20 nt, synthetic construct
  source 1..20: mol_type = other RNA
tccagccgagtccccactcc

SEQ ID NO: 270 - RNA, 20 nt, synthetic construct
  source 1..20: mol_type = other RNA
tccagccgccgccgtccagc

SEQ ID NO: 271 - RNA, 20 nt, synthetic construct
  source 1..20: mol_type = other RNA
tccccactccggagtcgccg

SEQ ID NO: 272 - RNA, 20 nt, synthetic construct
  source 1..20: mol_type = other RNA
tccccgcggcagcggcgact

SEQ ID NO: 273 - RNA, 20 nt, synthetic construct
  source 1..20: mol_type = other RNA
tccctccagccgccgccgtc

SEQ ID NO: 274 - RNA, 20 nt, synthetic construct
  source 1..20: mol_type = other RNA
tccctgtcctgcgcccgcgc

SEQ ID NO: 275 - RNA, 20 nt, synthetic construct
  source 1..20: mol_type = other RNA
tccgcgccactgcctctcag

SEQ ID NO: 276 - RNA, 20 nt, synthetic construct
  source 1..20: mol_type = other RNA
tccgcgcccactggttccct

SEQ ID NO: 277 - RNA, 20 nt, synthetic construct
  source 1..20: mol_type = other RNA
tccggagtcgccgctgccgc

SEQ ID NO: 278 - RNA, 20 nt, synthetic construct
  source 1..20: mol_type = other RNA
tccggagtggggactcggct

SEQ ID NO: 279 - RNA, 20 nt, synthetic construct
  source 1..20: mol_type = other RNA
tcctctgcgttcaggggtaa

SEQ ID NO: 280 - RNA, 20 nt, synthetic construct
  source 1..20: mol_type = other RNA
tcgcaggcggtccgcgccac

SEQ ID NO: 281 - RNA, 20 nt, synthetic construct
  source 1..20: mol_type = other RNA
tcgccgctgccgcggggaca

SEQ ID NO: 282 - RNA, 20 nt, synthetic construct
  source 1..20: mol_type = other RNA
tcggctggacggcggcggct

SEQ ID NO: 283 - RNA, 20 nt, synthetic construct
  source 1..20: mol_type = other RNA
tctcagtccctgtcctgcgc

SEQ ID NO: 284 - RNA, 20 nt, synthetic construct
  source 1..20: mol_type = other RNA
tctgcgttcaggggtaagcg

SEQ ID NO: 285 - RNA, 20 nt, synthetic construct
  source 1..20: mol_type = other RNA
tgaacgcagaggaccatgtc

SEQ ID NO: 286 - RNA, 20 nt, synthetic construct
  source 1..20: mol_type = other RNA
tgagaggcagtggcgcggac

SEQ ID NO: 287 - RNA, 20 nt, synthetic construct
  source 1..20: mol_type = other RNA
tgccgcggggacatggtcct

SEQ ID NO: 288 - RNA, 20 nt, synthetic construct
  source 1..20: mol_type = other RNA
tgcctctcagtccctgtcct

SEQ ID NO: 289 - RNA, 20 nt, synthetic construct
  source 1..20: mol_type = other RNA
tgcgttcaggggtaagcgcg

SEQ ID NO: 290 - RNA, 20 nt, synthetic construct
  source 1..20: mol_type = other RNA
tgctgggtaggctcccgggg

SEQ ID NO: 291 - RNA, 20 nt, synthetic construct
  source 1..20: mol_type = other RNA
tggacggcggcggctggagg

SEQ ID NO: 292 - RNA, 20 nt, synthetic construct
  source 1..20: mol_type = other RNA
tggagggaaccagtgggcgc

SEQ ID NO: 293 - RNA, 20 nt, synthetic construct
  source 1..20: mol_type = other RNA
tggccgggaagggggcagag

SEQ ID NO: 294 - RNA, 20 nt, synthetic construct
  source 1..20: mol_type = other RNA
tgggcgcggagcgcgtgctg

SEQ ID NO: 295 - RNA, 20 nt, synthetic construct
  source 1..20: mol_type = other RNA
tggggactcggctggacggc

SEQ ID NO: 296 - RNA, 20 nt, synthetic construct
  source 1..20: mol_type = other RNA
tgggtaggctcccggggcgc

SEQ ID NO: 297 - RNA, 20 nt, synthetic construct
  source 1..20: mol_type = other RNA
tggtcctctgcgttcagggg

SEQ ID NO: 298 - RNA, 20 nt, synthetic construct
  source 1..20: mol_type = other RNA
tggttccctccagccgccgc

SEQ ID NO: 299 - RNA, 20 nt, synthetic construct
  source 1..20: mol_type = other RNA
tgtccccgcggcagcggcga

SEQ ID NO: 300 - RNA, 20 nt, synthetic construct
  source 1..20: mol_type = other RNA
ttacccctgaacgcagagga

SEQ ID NO: 301 - RNA, 20 nt, synthetic construct
  source 1..20: mol_type = other RNA
ttcaggggtaagcgcggctc

SEQ ID NO: 302 - RNA, 20 nt, synthetic construct
  source 1..20: mol_type = other RNA
ttccctccagccgccgccgt

SEQ ID NO: 303 - RNA, 21 nt, synthetic construct
  source 1..21: mol_type = other RNA
aaccagtgggcgcggagcgcg

SEQ ID NO: 304 - RNA, 21 nt, synthetic construct
  source 1..21: mol_type = other RNA
aacgcagaggaccatgtcccc

SEQ ID NO: 305 - RNA, 21 nt, synthetic construct
  source 1..21: mol_type = other RNA
aagcgcggctctctgccccct

SEQ ID NO: 306 - RNA, 21 nt, synthetic construct
  source 1..21: mol_type = other RNA
aagggggcagagagccgcgct

SEQ ID NO: 307 - RNA, 21 nt, synthetic construct
  source 1..21: mol_type = other RNA
acagggactgagaggcagtgg

SEQ ID NO: 308 - RNA, 21 nt, synthetic construct
  source 1..21: mol_type = other RNA
acatggtcctctgcgttcagg

SEQ ID NO: 309 - RNA, 21 nt, synthetic construct
  source 1..21: mol_type = other RNA
accagtgggcgcggagcgcgt

SEQ ID NO: 310 - RNA, 21 nt, synthetic construct
  source 1..21: mol_type = other RNA
accatgtccccgcggcagcgg

SEQ ID NO: 311 - RNA, 21 nt, synthetic construct
  source 1..21: mol_type = other RNA
acccctgaacgcagaggacca

SEQ ID NO: 312 - RNA, 21 nt, synthetic construct
  source 1..21: mol_type = other RNA
acgcagaggaccatgtccccg

SEQ ID NO: 313 - RNA, 21 nt, synthetic construct
  source 1..21: mol_type = other RNA
acgcgctccgcgcccactggt

SEQ ID NO: 314 - RNA, 21 nt, synthetic construct
  source 1..21: mol_type = other RNA
acggcggcggctggagggaac

SEQ ID NO: 315 - RNA, 21 nt, synthetic construct
  source 1..21: mol_type = other RNA
actccggagtcgccgctgccg

SEQ ID NO: 316 - RNA, 21 nt, synthetic construct
  source 1..21: mol_type = other RNA
actccggagtggggactcggc

SEQ ID NO: 317 - RNA, 21 nt, synthetic construct
  source 1..21: mol_type = other RNA
actgagaggcagtggcgcgga

SEQ ID NO: 318 - RNA, 21 nt, synthetic construct
  source 1..21: mol_type = other RNA
actgcctctcagtccctgtcc

SEQ ID NO: 319 - RNA, 21 nt, synthetic construct
  source 1..21: mol_type = other RNA
actggttccctccagccgccg

SEQ ID NO: 320 - RNA, 21 nt, synthetic construct
  source 1..21: mol_type = other RNA
agagagccgcgcttacccctg

SEQ ID NO: 321 - RNA, 21 nt, synthetic construct
  source 1..21: mol_type = other RNA
agagccgcgcttacccctgaa

SEQ ID NO: 322 - RNA, 21 nt, synthetic construct
  source 1..21: mol_type = other RNA
agaggaccatgtccccgcggc

SEQ ID NO: 323 - RNA, 21 nt, synthetic construct
  source 1..21: mol_type = other RNA
agaggcagtggcgcggaccgc

SEQ ID NO: 324 - RNA, 21 nt, synthetic construct
  source 1..21: mol_type = other RNA
agcacgcgctccgcgcccact

SEQ ID NO: 325 - RNA, 21 nt, synthetic construct
  source 1..21: mol_type = other RNA
agccgagtccccactccggag

SEQ ID NO: 326 - RNA, 21 nt, synthetic construct
  source 1..21: mol_type = other RNA
agccgcgcttacccctgaacg

SEQ ID NO: 327 - RNA, 21 nt, synthetic construct
  source 1..21: mol_type = other RNA
agcctacccagcacgcgctcc

SEQ ID NO: 328 - RNA, 21 nt, synthetic construct
  source 1..21: mol_type = other RNA
agcgcggctctctgccccctt

SEQ ID NO: 329 - RNA, 21 nt, synthetic construct
  source 1..21: mol_type = other RNA
agcgcgtgctgggtaggctcc

SEQ ID NO: 330 - RNA, 21 nt, synthetic construct
  source 1..21: mol_type = other RNA
agcggcgactccggagtgggg

SEQ ID NO: 331 - RNA, 21 nt, synthetic construct
  source 1..21: mol_type = other RNA
aggacagggactgagaggcag

SEQ ID NO: 332 - RNA, 21 nt, synthetic construct
  source 1..21: mol_type = other RNA
aggaccatgtccccgcggcag

SEQ ID NO: 333 - RNA, 21 nt, synthetic construct
  source 1..21: mol_type = other RNA
aggcggtccgcgccactgcct

SEQ ID NO: 334 - RNA, 21 nt, synthetic construct
  source 1..21: mol_type = other RNA
agggaaccagtgggcgcggag

SEQ ID NO: 335 - RNA, 21 nt, synthetic construct
  source 1..21: mol_type = other RNA
agggactgagaggcagtggcg

SEQ ID NO: 336 - RNA, 21 nt, synthetic construct
  source 1..21: mol_type = other RNA
agggggcagagagccgcgctt

SEQ ID NO: 337 - RNA, 21 nt, synthetic construct
  source 1..21: mol_type = other RNA
aggggtaagcgcggctctctg

SEQ ID NO: 338 - RNA, 21 nt, synthetic construct
  source 1..21: mol_type = other RNA
agtccccactccggagtcgcc

SEQ ID NO: 339 - RNA, 21 nt, synthetic construct
  source 1..21: mol_type = other RNA
agtccctgtcctgcgcccgcg

SEQ ID NO: 340 - RNA, 21 nt, synthetic construct
  source 1..21: mol_type = other RNA
agtgggcgcggagcgcgtgct

SEQ ID NO: 341 - RNA, 21 nt, synthetic construct
  source 1..21: mol_type = other RNA
agtggggactcggctggacgg

SEQ ID NO: 342 - RNA, 21 nt, synthetic construct
  source 1..21: mol_type = other RNA
atggtcctctgcgttcagggg

SEQ ID NO: 343 - RNA, 21 nt, synthetic construct
  source 1..21: mol_type = other RNA
atgtccccgcggcagcggcga

SEQ ID NO: 344 - RNA, 21 nt, synthetic construct
  source 1..21: mol_type = other RNA
cactccggagtcgccgctgcc

SEQ ID NO: 345 - RNA, 21 nt, synthetic construct
  source 1..21: mol_type = other RNA
cactgcctctcagtccctgtc

SEQ ID NO: 346 - RNA, 21 nt, synthetic construct
  source 1..21: mol_type = other RNA
cactggttccctccagccgcc

SEQ ID NO: 347 - RNA, 21 nt, synthetic construct
  source 1..21: mol_type = other RNA
cagagagccgcgcttacccct

SEQ ID NO: 348 - RNA, 21 nt, synthetic construct
  source 1..21: mol_type = other RNA
cagaggaccatgtccccgcgg

SEQ ID NO: 349 - RNA, 21 nt, synthetic construct
  source 1..21: mol_type = other RNA
cagccgagtccccactccgga

SEQ ID NO: 350 - RNA, 21 nt, synthetic construct
  source 1..21: mol_type = other RNA
cagcggcgactccggagtggg

SEQ ID NO: 351 - RNA, 21 nt, synthetic construct
  source 1..21: mol_type = other RNA
caggacagggactgagaggca

SEQ ID NO: 352 - RNA, 21 nt, synthetic construct
  source 1..21: mol_type = other RNA
cagggactgagaggcagtggc

SEQ ID NO: 353 - RNA, 21 nt, synthetic construct
  source 1..21: mol_type = other RNA
caggggtaagcgcggctctct

SEQ ID NO: 354 - RNA, 21 nt, synthetic construct
  source 1..21: mol_type = other RNA
cagtccctgtcctgcgcccgc

SEQ ID NO: 355 - RNA, 21 nt, synthetic construct
  source 1..21: mol_type = other RNA
catggtcctctgcgttcaggg

SEQ ID NO: 356 - RNA, 21 nt, synthetic construct
  source 1..21: mol_type = other RNA
ccactccggagtcgccgctgc

SEQ ID NO: 357 - RNA, 21 nt, synthetic construct
  source 1..21: mol_type = other RNA
ccactgcctctcagtccctgt

SEQ ID NO: 358 - RNA, 21 nt, synthetic construct
  source 1..21: mol_type = other RNA
ccactggttccctccagccgc

SEQ ID NO: 359 - RNA, 21 nt, synthetic construct
  source 1..21: mol_type = other RNA
ccagccgagtccccactccgg

SEQ ID NO: 360 - RNA, 21 nt, synthetic construct
  source 1..21: mol_type = other RNA
cccactccggagtcgccgctg

SEQ ID NO: 361 - RNA, 21 nt, synthetic construct
  source 1..21: mol_type = other RNA
cccactggttccctccagccg

SEQ ID NO: 362 - RNA, 21 nt, synthetic construct
  source 1..21: mol_type = other RNA
ccccactccggagtcgccgct

SEQ ID NO: 363 - RNA, 21 nt, synthetic construct
  source 1..21: mol_type = other RNA
ccccgggagcctacccagcac

SEQ ID NO: 364 - RNA, 21 nt, synthetic construct
  source 1..21: mol_type = other RNA
cccctgaacgcagaggaccat

SEQ ID NO: 365 - RNA, 21 nt, synthetic construct
  source 1..21: mol_type = other RNA
cccgggagcctacccagcacg

SEQ ID NO: 366 - RNA, 21 nt, synthetic construct
  source 1..21: mol_type = other RNA
ccctgaacgcagaggaccatg

SEQ ID NO: 367 - RNA, 21 nt, synthetic construct
  source 1..21: mol_type = other RNA
ccgagtccccactccggagtc

SEQ ID NO: 368 - RNA, 21 nt, synthetic construct
  source 1..21: mol_type = other RNA
ccgcgccactgcctctcagtc

SEQ ID NO: 369 - RNA, 21 nt, synthetic construct
  source 1..21: mol_type = other RNA
ccgcgcccactggttccctcc

SEQ ID NO: 370 - RNA, 21 nt, synthetic construct
  source 1..21: mol_type = other RNA
ccgcgcttacccctgaacgca

SEQ ID NO: 371 - RNA, 21 nt, synthetic construct
  source 1..21: mol_type = other RNA
ccgcggggacatggtcctctg

SEQ ID NO: 372 - RNA, 21 nt, synthetic construct
  source 1..21: mol_type = other RNA
ccgctgccgcggggacatggt

SEQ ID NO: 373 - RNA, 21 nt, synthetic construct
  source 1..21: mol_type = other RNA
ccggagtggggactcggctgg

SEQ ID NO: 374 - RNA, 21 nt, synthetic construct
  source 1..21: mol_type = other RNA
ccgggaagggggcagagagcc

SEQ ID NO: 375 - RNA, 21 nt, synthetic construct
  source 1..21: mol_type = other RNA
ccgggagcctacccagcacgc

SEQ ID NO: 376 - RNA, 21 nt, synthetic construct
  source 1..21: mol_type = other RNA
ccgtccagccgagtccccact

SEQ ID NO: 377 - RNA, 21 nt, synthetic construct
  source 1..21: mol_type = other RNA
cctacccagcacgcgctccgc

SEQ ID NO: 378 - RNA, 21 nt, synthetic construct
  source 1..21: mol_type = other RNA
cctctcagtccctgtcctgcg

SEQ ID NO: 379 - RNA, 21 nt, synthetic construct
  source 1..21: mol_type = other RNA
cctctgcgttcaggggtaagc

SEQ ID NO: 380 - RNA, 21 nt, synthetic construct
  source 1..21: mol_type = other RNA
cctgaacgcagaggaccatgt

SEQ ID NO: 381 - RNA, 21 nt, synthetic construct
  source 1..21: mol_type = other RNA
cgactccggagtggggactcg

SEQ ID NO: 382 - RNA, 21 nt, synthetic construct
  source 1..21: mol_type = other RNA
cgagtccccactccggagtcg

SEQ ID NO: 383 - RNA, 21 nt, synthetic construct
  source 1..21: mol_type = other RNA
cgcagaggaccatgtccccgc

SEQ ID NO: 384 - RNA, 21 nt, synthetic construct
  source 1..21: mol_type = other RNA
cgcaggacagggactgagagg

SEQ ID NO: 385 - RNA, 21 nt, synthetic construct
  source 1..21: mol_type = other RNA
cgccactgcctctcagtccct

SEQ ID NO: 386 - RNA, 21 nt, synthetic construct
  source 1..21: mol_type = other RNA
cgcccactggttccctccagc

SEQ ID NO: 387 - RNA, 21 nt, synthetic construct
  source 1..21: mol_type = other RNA
cgccgtccagccgagtcccca

SEQ ID NO: 388 - RNA, 21 nt, synthetic construct
  source 1..21: mol_type = other RNA
cgcgccactgcctctcagtcc

SEQ ID NO: 389 - RNA, 21 nt, synthetic construct
  source 1..21: mol_type = other RNA
cgcgcccactggttccctcca

SEQ ID NO: 390 - RNA, 21 nt, synthetic construct
  source 1..21: mol_type = other RNA
cgcgctccgcgcccactggtt

SEQ ID NO: 391 - RNA, 21 nt, synthetic construct
  source 1..21: mol_type = other RNA
cgcgcttacccctgaacgcag

SEQ ID NO: 392 - RNA, 21 nt, synthetic construct
  source 1..21: mol_type = other RNA
cgcggagcgcgtgctgggtag

SEQ ID NO: 393 - RNA, 21 nt, synthetic construct
  source 1..21: mol_type = other RNA
cgcgggcgcaggacagggact

SEQ ID NO: 394 - RNA, 21 nt, synthetic construct
  source 1..21: mol_type = other RNA
cgcggggacatggtcctctgc

SEQ ID NO: 395 - RNA, 21 nt, synthetic construct
  source 1..21: mol_type = other RNA
cgcgtgctgggtaggctcccg

SEQ ID NO: 396 - RNA, 21 nt, synthetic construct
  source 1..21: mol_type = other RNA
cgctccgcgcccactggttcc

SEQ ID NO: 397 - RNA, 21 nt, synthetic construct
  source 1..21: mol_type = other RNA
cgctgccgcggggacatggtc

SEQ ID NO: 398 - RNA, 21 nt, synthetic construct
  source 1..21: mol_type = other RNA
cgcttacccctgaacgcagag

SEQ ID NO: 399 - RNA, 21 nt, synthetic construct
  source 1..21: mol_type = other RNA
cggagcgcgtgctgggtaggc

SEQ ID NO: 400 - RNA, 21 nt, synthetic construct
  source 1..21: mol_type = other RNA
cggagtggggactcggctgga

SEQ ID NO: 401 - RNA, 21 nt, synthetic construct
  source 1..21: mol_type = other RNA
cggcagcggcgactccggagt

SEQ ID NO: 402 - RNA, 21 nt, synthetic construct
  source 1..21: mol_type = other RNA
cggcgactccggagtggggac

SEQ ID NO: 403 - RNA, 21 nt, synthetic construct
  source 1..21: mol_type = other RNA
cggcggctggagggaaccagt

SEQ ID NO: 404 - RNA, 21 nt, synthetic construct
  source 1..21: mol_type = other RNA
cggctggagggaaccagtggg

SEQ ID NO: 405 - RNA, 21 nt, synthetic construct
  source 1..21: mol_type = other RNA
cgggaagggggcagagagccg

SEQ ID NO: 406 - RNA, 21 nt, synthetic construct
  source 1..21: mol_type = other RNA
cgggagcctacccagcacgcg

SEQ ID NO: 407 - RNA, 21 nt, synthetic construct
  source 1..21: mol_type = other RNA
cgggcgcaggacagggactga

SEQ ID NO: 408 - RNA, 21 nt, synthetic construct
  source 1..21: mol_type = other RNA
cggggacatggtcctctgcgt

SEQ ID NO: 409 - RNA, 21 nt, synthetic construct
  source 1..21: mol_type = other RNA
cggtccgcgccactgcctctc

SEQ ID NO: 410 - RNA, 21 nt, synthetic construct
  source 1..21: mol_type = other RNA
cgtccagccgagtccccactc

SEQ ID NO: 411 - RNA, 21 nt, synthetic construct
  source 1..21: mol_type = other RNA
cgtgctgggtaggctcccggg

SEQ ID NO: 412 - RNA, 21 nt, synthetic construct
  source 1..21: mol_type = other RNA
cgttcaggggtaagcgcggct

SEQ ID NO: 413 - RNA, 21 nt, synthetic construct
  source 1..21: mol_type = other RNA
ctacccagcacgcgctccgcg

SEQ ID NO: 414 - RNA, 21 nt, synthetic construct
  source 1..21: mol_type = other RNA
ctcagtccctgtcctgcgccc

SEQ ID NO: 415 - RNA, 21 nt, synthetic construct
  source 1..21: mol_type = other RNA
ctccgcgcccactggttccct

SEQ ID NO: 416 - RNA, 21 nt, synthetic construct
  source 1..21: mol_type = other RNA
ctccggagtggggactcggct

SEQ ID NO: 417 - RNA, 21 nt, synthetic construct
  source 1..21: mol_type = other RNA
ctctcagtccctgtcctgcgc

SEQ ID NO: 418 - RNA, 21 nt, synthetic construct
  source 1..21: mol_type = other RNA
ctctgcgttcaggggtaagcg

SEQ ID NO: 419 - RNA, 21 nt, synthetic construct
  source 1..21: mol_type = other RNA
ctgaacgcagaggaccatgtc

SEQ ID NO: 420 - RNA, 21 nt, synthetic construct
  source 1..21: mol_type = other RNA
ctgagaggcagtggcgcggac

SEQ ID NO: 421 - RNA, 21 nt, synthetic construct
  source 1..21: mol_type = other RNA
ctgccgcggggacatggtcct

SEQ ID NO: 422 - RNA, 21 nt, synthetic construct
  source 1..21: mol_type = other RNA
ctgcctctcagtccctgtcct

SEQ ID NO: 423 - RNA, 21 nt, synthetic construct
  source 1..21: mol_type = other RNA
ctgcgttcaggggtaagcgcg

SEQ ID NO: 424 - RNA, 21 nt, synthetic construct
  source 1..21: mol_type = other RNA
ctggagggaaccagtgggcgc

SEQ ID NO: 425 - RNA, 21 nt, synthetic construct
  source 1..21: mol_type = other RNA
ctggttccctccagccgccgc

SEQ ID NO: 426 - RNA, 21 nt, synthetic construct
  source 1..21: mol_type = other RNA
cttacccctgaacgcagagga

SEQ ID NO: 427 - RNA, 21 nt, synthetic construct
  source 1..21: mol_type = other RNA
gaaccagtgggcgcggagcgc

SEQ ID NO: 428 - RNA, 21 nt, synthetic construct
  source 1..21: mol_type = other RNA
gaacgcagaggaccatgtccc

SEQ ID NO: 429 - RNA, 21 nt, synthetic construct
  source 1..21: mol_type = other RNA
gaagggggcagagagccgcgc

SEQ ID NO: 430 - RNA, 21 nt, synthetic construct
  source 1..21: mol_type = other RNA
gacagggactgagaggcagtg

SEQ ID NO: 431 - RNA, 21 nt, synthetic construct
  source 1..21: mol_type = other RNA
gacatggtcctctgcgttcag

SEQ ID NO: 432 - RNA, 21 nt, synthetic construct
  source 1..21: mol_type = other RNA
gaccatgtccccgcggcagcg

SEQ ID NO: 433 - RNA, 21 nt, synthetic construct
  source 1..21: mol_type = other RNA
gacggcggcggctggagggaa

SEQ ID NO: 434 - RNA, 21 nt, synthetic construct
  source 1..21: mol_type = other RNA
gactccggagtggggactcgg

SEQ ID NO: 435 - RNA, 21 nt, synthetic construct
  source 1..21: mol_type = other RNA
gactgagaggcagtggcgcgg

SEQ ID NO: 436 - RNA, 21 nt, synthetic construct
  source 1..21: mol_type = other RNA
gagagccgcgcttacccctga

SEQ ID NO: 437 - RNA, 21 nt, synthetic construct
  source 1..21: mol_type = other RNA
gagaggcagtggcgcggaccg

SEQ ID NO: 438 - RNA, 21 nt, synthetic construct
  source 1..21: mol_type = other RNA
gagccgcgcttacccctgaac

SEQ ID NO: 439 - RNA, 21 nt, synthetic construct
  source 1..21: mol_type = other RNA
gagcctacccagcacgcgctc

SEQ ID NO: 440 - RNA, 21 nt, synthetic construct
  source 1..21: mol_type = other RNA
gagcgcgtgctgggtaggctc

SEQ ID NO: 441 - RNA, 21 nt, synthetic construct
  source 1..21: mol_type = other RNA
gaggaccatgtccccgcggca

SEQ ID NO: 442 - RNA, 21 nt, synthetic construct
  source 1..21: mol_type = other RNA
gagggaaccagtgggcgcgga

SEQ ID NO: 443 - RNA, 21 nt, synthetic construct
  source 1..21: mol_type = other RNA
gagtccccactccggagtcgc

SEQ ID NO: 444 - RNA, 21 nt, synthetic construct
  source 1..21: mol_type = other RNA
gagtggggactcggctggacg

SEQ ID NO: 445 - RNA, 21 nt, synthetic construct
  source 1..21: mol_type = other RNA
gcagagagccgcgcttacccc

SEQ ID NO: 446 - RNA, 21 nt, synthetic construct
  source 1..21: mol_type = other RNA
gcagaggaccatgtccccgcg

SEQ ID NO: 447 - RNA, 21 nt, synthetic construct
  source 1..21: mol_type = other RNA
gcagcggcgactccggagtgg

SEQ ID NO: 448 - RNA, 21 nt, synthetic construct
  source 1..21: mol_type = other RNA
gcaggacagggactgagaggc

SEQ ID NO: 449 - RNA, 21 nt, synthetic construct
  source 1..21: mol_type = other RNA
gccactgcctctcagtccctg

SEQ ID NO: 450 - RNA, 21 nt, synthetic construct
  source 1..21: mol_type = other RNA
gcccactggttccctccagcc

SEQ ID NO: 451 - RNA, 21 nt, synthetic construct
  source 1..21: mol_type = other RNA
gccccgggagcctacccagca

SEQ ID NO: 452 - RNA, 21 nt, synthetic construct
  source 1..21: mol_type = other RNA
gccgagtccccactccggagt

SEQ ID NO: 453 - RNA, 21 nt, synthetic construct
  source 1..21: mol_type = other RNA
gccgcgcttacccctgaacgc

SEQ ID NO: 454 - RNA, 21 nt, synthetic construct
  source 1..21: mol_type = other RNA
gccgcggggacatggtcctct

SEQ ID NO: 455 - RNA, 21 nt, synthetic construct
  source 1..21: mol_type = other RNA
gccgggaagggggcagagagc

SEQ ID NO: 456 - RNA, 21 nt, synthetic construct
  source 1..21: mol_type = other RNA
gccgtccagccgagtccccac

SEQ ID NO: 457 - RNA, 21 nt, synthetic construct
  source 1..21: mol_type = other RNA
gcctacccagcacgcgctccg

SEQ ID NO: 458 - RNA, 21 nt, synthetic construct
  source 1..21: mol_type = other RNA
gcctctcagtccctgtcctgc

SEQ ID NO: 459 - RNA, 21 nt, synthetic construct
  source 1..21: mol_type = other RNA
gcgactccggagtggggactc

SEQ ID NO: 460 - RNA, 21 nt, synthetic construct
  source 1..21: mol_type = other RNA
gcgcaggacagggactgagag

SEQ ID NO: 461 - RNA, 21 nt, synthetic construct
  source 1..21: mol_type = other RNA
gcgccactgcctctcagtccc

SEQ ID NO: 462 - RNA, 21 nt, synthetic construct
  source 1..21: mol_type = other RNA
gcgcccactggttccctccag

SEQ ID NO: 463 - RNA, 21 nt, synthetic construct
  source 1..21: mol_type = other RNA
gcgcggagcgcgtgctgggta

SEQ ID NO: 464 - RNA, 21 nt, synthetic construct
  source 1..21: mol_type = other RNA
gcgcgtgctgggtaggctccc

SEQ ID NO: 465 - RNA, 21 nt, synthetic construct
  source 1..21: mol_type = other RNA
gcgctccgcgcccactggttc

SEQ ID NO: 466 - RNA, 21 nt, synthetic construct
  source 1..21: mol_type = other RNA
gcgcttacccctgaacgcaga

SEQ ID NO: 467 - RNA, 21 nt, synthetic construct
  source 1..21: mol_type = other RNA
gcggagcgcgtgctgggtagg

SEQ ID NO: 468 - RNA, 21 nt, synthetic construct
  source 1..21: mol_type = other RNA
gcggcgactccggagtgggga

SEQ ID NO: 469 - RNA, 21 nt, synthetic construct
  source 1..21: mol_type = other RNA
gcggcggctggagggaaccag

SEQ ID NO: 470 - RNA, 21 nt, synthetic construct
  source 1..21: mol_type = other RNA
gcggctggagggaaccagtgg

SEQ ID NO: 471 - RNA, 21 nt, synthetic construct
  source 1..21: mol_type = other RNA
gcgggcgcaggacagggactg

SEQ ID NO: 472 - RNA, 21 nt, synthetic construct
  source 1..21: mol_type = other RNA
gcggggacatggtcctctgcg

SEQ ID NO: 473 - RNA, 21 nt, synthetic construct
  source 1..21: mol_type = other RNA
gcggtccgcgccactgcctct

SEQ ID NO: 474 - RNA, 21 nt, synthetic construct
  source 1..21: mol_type = other RNA
gcgtgctgggtaggctcccgg

SEQ ID NO: 475 - RNA, 21 nt, synthetic construct
  source 1..21: mol_type = other RNA
gcgttcaggggtaagcgcggc

SEQ ID NO: 476 - RNA, 21 nt, synthetic construct
  source 1..21: mol_type = other RNA
gctccgcgcccactggttccc

SEQ ID NO: 477 - RNA, 21 nt, synthetic construct
  source 1..21: mol_type = other RNA
gctgccgcggggacatggtcc

SEQ ID NO: 478 - RNA, 21 nt, synthetic construct
  source 1..21: mol_type = other RNA
gctggagggaaccagtgggcg

SEQ ID NO: 479 - RNA, 21 nt, synthetic construct
  source 1..21: mol_type = other RNA
gcttacccctgaacgcagagg

SEQ ID NO: 480 - RNA, 21 nt, synthetic construct
  source 1..21: mol_type = other RNA
ggaaccagtgggcgcggagcg

SEQ ID NO: 481 - RNA, 21 nt, synthetic construct
  source 1..21: mol_type = other RNA
ggaagggggcagagagccgcg

SEQ ID NO: 482 - RNA, 21 nt, synthetic construct
  source 1..21: mol_type = other RNA
ggacagggactgagaggcagt

SEQ ID NO: 483 - RNA, 21 nt, synthetic construct
  source 1..21: mol_type = other RNA
ggacatggtcctctgcgttca

SEQ ID NO: 484 - RNA, 21 nt, synthetic construct
  source 1..21: mol_type = other RNA
ggaccatgtccccgcggcagc

SEQ ID NO: 485 - RNA, 21 nt, synthetic construct
  source 1..21: mol_type = other RNA
ggactgagaggcagtggcgcg

SEQ ID NO: 486 - RNA, 21 nt, synthetic construct
  source 1..21: mol_type = other RNA
ggagcctacccagcacgcgct

SEQ ID NO: 487 - RNA, 21 nt, synthetic construct
  source 1..21: mol_type = other RNA
ggagcgcgtgctgggtaggct

SEQ ID NO: 488 - RNA, 21 nt, synthetic construct
  source 1..21: mol_type = other RNA
ggagggaaccagtgggcgcgg

SEQ ID NO: 489 - RNA, 21 nt, synthetic construct
  source 1..21: mol_type = other RNA
ggagtggggactcggctggac

SEQ ID NO: 490 - RNA, 21 nt, synthetic construct
  source 1..21: mol_type = other RNA
ggcagagagccgcgcttaccc

SEQ ID NO: 491 - RNA, 21 nt, synthetic construct
  source 1..21: mol_type = other RNA
ggcagcggcgactccggagtg

SEQ ID NO: 492 - RNA, 21 nt, synthetic construct
  source 1..21: mol_type = other RNA
ggccgggaagggggcagagag

SEQ ID NO: 493 - RNA, 21 nt, synthetic construct
  source 1..21: mol_type = other RNA
ggcgactccggagtggggact

SEQ ID NO: 494 - RNA, 21 nt, synthetic construct
  source 1..21: mol_type = other RNA
ggcgcaggacagggactgaga

SEQ ID NO: 495 - RNA, 21 nt, synthetic construct
  source 1..21: mol_type = other RNA
ggcggcggctggagggaacca

SEQ ID NO: 496 - RNA, 21 nt, synthetic construct
  source 1..21: mol_type = other RNA
ggcggctggagggaaccagtg

SEQ ID NO: 497 - RNA, 21 nt, synthetic construct
  source 1..21: mol_type = other RNA
ggctggagggaaccagtgggc

SEQ ID NO: 498 - RNA, 21 nt, synthetic construct
  source 1..21: mol_type = other RNA
gggaaccagtgggcgcggagc

SEQ ID NO: 499 - RNA, 21 nt, synthetic construct
  source 1..21: mol_type = other RNA
gggaagggggcagagagccgc

SEQ ID NO: 500 - RNA, 21 nt, synthetic construct
  source 1..21: mol_type = other RNA
gggacatggtcctctgcgttc

SEQ ID NO: 501 - RNA, 21 nt, synthetic construct
  source 1..21: mol_type = other RNA
gggactgagaggcagtggcgc

SEQ ID NO: 502 - RNA, 21 nt, synthetic construct
  source 1..21: mol_type = other RNA
gggagcctacccagcacgcgc

SEQ ID NO: 503 - RNA, 21 nt, synthetic construct
  source 1..21: mol_type = other RNA
gggcagagagccgcgcttacc

SEQ ID NO: 504 - RNA, 21 nt, synthetic construct
  source 1..21: mol_type = other RNA
gggcgcaggacagggactgag

SEQ ID NO: 505 - RNA, 21 nt, synthetic construct
  source 1..21: mol_type = other RNA
ggggacatggtcctctgcgtt

SEQ ID NO: 506 - RNA, 21 nt, synthetic construct
  source 1..21: mol_type = other RNA
ggggcagagagccgcgcttac

SEQ ID NO: 507 - RNA, 21 nt, synthetic construct
  source 1..21: mol_type = other RNA
gggggcagagagccgcgctta

SEQ ID NO: 508 - RNA, 21 nt, synthetic construct
  source 1..21: mol_type = other RNA
ggggtaagcgcggctctctgc

SEQ ID NO: 509 - RNA, 21 nt, synthetic construct
  source 1..21: mol_type = other RNA
gggtaagcgcggctctctgcc

SEQ ID NO: 510 - RNA, 21 nt, synthetic construct
  source 1..21: mol_type = other RNA
ggtaagcgcggctctctgccc

SEQ ID NO: 511 - RNA, 21 nt, synthetic construct
  source 1..21: mol_type = other RNA
ggtccgcgccactgcctctca

SEQ ID NO: 512 - RNA, 21 nt, synthetic construct
  source 1..21: mol_type = other RNA
ggtcctctgcgttcaggggta

SEQ ID NO: 513 - RNA, 21 nt, synthetic construct
  source 1..21: mol_type = other RNA
gtaagcgcggctctctgcccc

SEQ ID NO: 514 - RNA, 21 nt, synthetic construct
  source 1..21: mol_type = other RNA
gtccagccgagtccccactcc

SEQ ID NO: 515 - RNA, 21 nt, synthetic construct
  source 1..21: mol_type = other RNA
gtccccactccggagtcgccg

SEQ ID NO: 516 - RNA, 21 nt, synthetic construct
  source 1..21: mol_type = other RNA
gtccgcgccactgcctctcag

SEQ ID NO: 517 - RNA, 21 nt, synthetic construct
  source 1..21: mol_type = other RNA
gtcctctgcgttcaggggtaa

SEQ ID NO: 518 - RNA, 21 nt, synthetic construct
  source 1..21: mol_type = other RNA
gtgctgggtaggctcccgggg

SEQ ID NO: 519 - RNA, 21 nt, synthetic construct
  source 1..21: mol_type = other RNA
gtggggactcggctggacggc

SEQ ID NO: 520 - RNA, 21 nt, synthetic construct
  source 1..21: mol_type = other RNA
gttcaggggtaagcgcggctc

SEQ ID NO: 521 - RNA, 21 nt, synthetic construct
  source 1..21: mol_type = other RNA
gttccctccagccgccgccgt

SEQ ID NO: 522 - RNA, 21 nt, synthetic construct
  source 1..21: mol_type = other RNA
taagcgcggctctctgccccc

SEQ ID NO: 523 - RNA, 21 nt, synthetic construct
  source 1..21: mol_type = other RNA
tacccagcacgcgctccgcgc

SEQ ID NO: 524 - RNA, 21 nt, synthetic construct
  source 1..21: mol_type = other RNA
tacccctgaacgcagaggacc

SEQ ID NO: 525 - RNA, 21 nt, synthetic construct
  source 1..21: mol_type = other RNA
tcaggggtaagcgcggctctc

SEQ ID NO: 526 - RNA, 21 nt, synthetic construct
  source 1..21: mol_type = other RNA
tcagtccctgtcctgcgcccg

SEQ ID NO: 527 - RNA, 21 nt, synthetic construct
  source 1..21: mol_type = other RNA
tccagccgagtccccactccg

SEQ ID NO: 528 - RNA, 21 nt, synthetic construct
  source 1..21: mol_type = other RNA
tccccactccggagtcgccgc

SEQ ID NO: 529 - RNA, 21 nt, synthetic construct
  source 1..21: mol_type = other RNA
tccgcgccactgcctctcagt

SEQ ID NO: 530 - RNA, 21 nt, synthetic construct
  source 1..21: mol_type = other RNA
tccgcgcccactggttccctc

SEQ ID NO: 531 - RNA, 21 nt, synthetic construct
  source 1..21: mol_type = other RNA
tccggagtggggactcggctg

SEQ ID NO: 532 - RNA, 21 nt, synthetic construct
  source 1..21: mol_type = other RNA
tcctctgcgttcaggggtaag

SEQ ID NO: 533 - RNA, 21 nt, synthetic construct
  source 1..21: mol_type = other RNA
tcgcaggcggtccgcgccact

SEQ ID NO: 534 - RNA, 21 nt, synthetic construct
  source 1..21: mol_type = other RNA
tcgccgctgccgcggggacat

SEQ ID NO: 535 - RNA, 21 nt, synthetic construct
  source 1..21: mol_type = other RNA
tctcagtccctgtcctgcgcc

SEQ ID NO: 536 - RNA, 21 nt, synthetic construct
  source 1..21: mol_type = other RNA
tctgcgttcaggggtaagcgc

SEQ ID NO: 537 - RNA, 21 nt, synthetic construct
  source 1..21: mol_type = other RNA
tgaacgcagaggaccatgtcc

SEQ ID NO: 538 - RNA, 21 nt, synthetic construct
  source 1..21: mol_type = other RNA
tgagaggcagtggcgcggacc

SEQ ID NO: 539 - RNA, 21 nt, synthetic construct
  source 1..21: mol_type = other RNA
tgccgcggggacatggtcctc

SEQ ID NO: 540 - RNA, 21 nt, synthetic construct
  source 1..21: mol_type = other RNA
tgcctctcagtccctgtcctg

SEQ ID NO: 541 - RNA, 21 nt, synthetic construct
  source 1..21: mol_type = other RNA
tgcgttcaggggtaagcgcgg

SEQ ID NO: 542 - RNA, 21 nt, synthetic construct
  source 1..21: mol_type = other RNA
tgctgggtaggctcccggggc

SEQ ID NO: 543 - RNA, 21 nt, synthetic construct
  source 1..21: mol_type = other RNA
tggagggaaccagtgggcgcg

SEQ ID NO: 544 - RNA, 21 nt, synthetic construct
  source 1..21: mol_type = other RNA
tggccgggaagggggcagaga

SEQ ID NO: 545 - RNA, 21 nt, synthetic construct
  source 1..21: mol_type = other RNA
tggggactcggctggacggcg

SEQ ID NO: 546 - RNA, 21 nt, synthetic construct
  source 1..21: mol_type = other RNA
tggtcctctgcgttcaggggt

SEQ ID NO: 547 - RNA, 21 nt, synthetic construct
  source 1..21: mol_type = other RNA
tggttccctccagccgccgcc

SEQ ID NO: 548 - RNA, 21 nt, synthetic construct
  source 1..21: mol_type = other RNA
ttacccctgaacgcagaggac

SEQ ID NO: 549 - RNA, 21 nt, synthetic construct
  source 1..21: mol_type = other RNA
ttcaggggtaagcgcggctct

SEQ ID NO: 550 - RNA, 21 nt, synthetic construct
  source 1..21: mol_type = other RNA
ttccctccagccgccgccgtc

SEQ ID NO: 551 - RNA, 22 nt, synthetic construct
  source 1..22: mol_type = other RNA
aaccagtgggcgcggagcgcgt

SEQ ID NO: 552 - RNA, 22 nt, synthetic construct
  source 1..22: mol_type = other RNA
aacgcagaggaccatgtccccg

SEQ ID NO: 553 - RNA, 22 nt, synthetic construct
  source 1..22: mol_type = other RNA
aagcgcggctctctgccccctt

SEQ ID NO: 554 - RNA, 22 nt, synthetic construct
  source 1..22: mol_type = other RNA
aagggggcagagagccgcgctt

SEQ ID NO: 555 - RNA, 22 nt, synthetic construct
  source 1..22: mol_type = other RNA
acagggactgagaggcagtggc

SEQ ID NO: 556 - RNA, 22 nt, synthetic construct
  source 1..22: mol_type = other RNA
acatggtcctctgcgttcaggg

SEQ ID NO: 557 - RNA, 22 nt, synthetic construct
  source 1..22: mol_type = other RNA
accagtgggcgcggagcgcgtg

SEQ ID NO: 558 - RNA, 22 nt, synthetic construct
  source 1..22: mol_type = other RNA
accatgtccccgcggcagcggc

SEQ ID NO: 559 - RNA, 22 nt, synthetic construct
  source 1..22: mol_type = other RNA
acccctgaacgcagaggaccat

SEQ ID NO: 560 - RNA, 22 nt, synthetic construct
  source 1..22: mol_type = other RNA
acgcagaggaccatgtccccgc

SEQ ID NO: 561 - RNA, 22 nt, synthetic construct
  source 1..22: mol_type = other RNA
acgcgctccgcgcccactggtt

SEQ ID NO: 562 - RNA, 22 nt, synthetic construct
  source 1..22: mol_type = other RNA
acggcggcggctggagggaacc

SEQ ID NO: 563 - RNA, 22 nt, synthetic construct
  source 1..22: mol_type = other RNA
actccggagtcgccgctgccgc

SEQ ID NO: 564 - RNA, 22 nt, synthetic construct
  source 1..22: mol_type = other RNA
actccggagtggggactcggct

SEQ ID NO: 565 - RNA, 22 nt, synthetic construct
  source 1..22: mol_type = other RNA
actcggctggacggcggcggct

SEQ ID NO: 566 - RNA, 22 nt, synthetic construct
  source 1..22: mol_type = other RNA
actgagaggcagtggcgcggac

SEQ ID NO: 567 - RNA, 22 nt, synthetic construct
  source 1..22: mol_type = other RNA
actgcctctcagtccctgtcct

SEQ ID NO: 568 - RNA, 22 nt, synthetic construct
  source 1..22: mol_type = other RNA
actggttccctccagccgccgc

SEQ ID NO: 569 - RNA, 22 nt, synthetic construct
  source 1..22: mol_type = other RNA
agagagccgcgcttacccctga

SEQ ID NO: 570 - RNA, 22 nt, synthetic construct
  source 1..22: mol_type = other RNA
agagccgcgcttacccctgaac

SEQ ID NO: 571 - RNA, 22 nt, synthetic construct
  source 1..22: mol_type = other RNA
agaggaccatgtccccgcggca

SEQ ID NO: 572 - RNA, 22 nt, synthetic construct
  source 1..22: mol_type = other RNA
agaggcagtggcgcggaccgcc

SEQ ID NO: 573 - RNA, 22 nt, synthetic construct
  source 1..22: mol_type = other RNA
agcacgcgctccgcgcccactg

SEQ ID NO: 574 - RNA, 22 nt, synthetic construct
  source 1..22: mol_type = other RNA
agccgagtccccactccggagt

SEQ ID NO: 575 - RNA, 22 nt, synthetic construct
  source 1..22: mol_type = other RNA
agccgccgccgtccagccgagt

SEQ ID NO: 576 - RNA, 22 nt, synthetic construct
  source 1..22: mol_type = other RNA
agccgcgcttacccctgaacgc

SEQ ID NO: 577 - RNA, 22 nt, synthetic construct
  source 1..22: mol_type = other RNA
agcctacccagcacgcgctccg

SEQ ID NO: 578 - RNA, 22 nt, synthetic construct
  source 1..22: mol_type = other RNA
agcgcgtgctgggtaggctccc

SEQ ID NO: 579 - RNA, 22 nt, synthetic construct
  source 1..22: mol_type = other RNA
agcggcgactccggagtgggga

SEQ ID NO: 580 - RNA, 22 nt, synthetic construct
  source 1..22: mol_type = other RNA
aggacagggactgagaggcagt

SEQ ID NO: 581 - RNA, 22 nt, synthetic construct
  source 1..22: mol_type = other RNA
aggaccatgtccccgcggcagc

SEQ ID NO: 582 - RNA, 22 nt, synthetic construct
  source 1..22: mol_type = other RNA
aggcggtccgcgccactgcctc

SEQ ID NO: 583 - RNA, 22 nt, synthetic construct
  source 1..22: mol_type = other RNA
agggaaccagtgggcgcggagc

SEQ ID NO: 584 - RNA, 22 nt, synthetic construct
  source 1..22: mol_type = other RNA
agggactgagaggcagtggcgc

SEQ ID NO: 585 - RNA, 22 nt, synthetic construct
  source 1..22: mol_type = other RNA
agggggcagagagccgcgctta

SEQ ID NO: 586 - RNA, 22 nt, synthetic construct
  source 1..22: mol_type = other RNA
aggggtaagcgcggctctctgc

SEQ ID NO: 587 - RNA, 22 nt, synthetic construct
  source 1..22: mol_type = other RNA
agtccccactccggagtcgccg

SEQ ID NO: 588 - RNA, 22 nt, synthetic construct
  source 1..22: mol_type = other RNA
agtccctgtcctgcgcccgcgc

SEQ ID NO: 589 - RNA, 22 nt, synthetic construct
  source 1..22: mol_type = other RNA
agtcgccgctgccgcggggaca

SEQ ID NO: 590 - RNA, 22 nt, synthetic construct
  source 1..22: mol_type = other RNA
agtgggcgcggagcgcgtgctg

SEQ ID NO: 591 - RNA, 22 nt, synthetic construct
  source 1..22: mol_type = other RNA
agtggggactcggctggacggc

SEQ ID NO: 592 - RNA, 22 nt, synthetic construct
  source 1..22: mol_type = other RNA
atggtcctctgcgttcaggggt

SEQ ID NO: 593 - RNA, 22 nt, synthetic construct
  source 1..22: mol_type = other RNA
atgtccccgcggcagcggcgac

SEQ ID NO: 594 - RNA, 22 nt, synthetic construct
  source 1..22: mol_type = other RNA
cacgcgctccgcgcccactggt

SEQ ID NO: 595 - RNA, 22 nt, synthetic construct
  source 1..22: mol_type = other RNA
cactccggagtcgccgctgccg

SEQ ID NO: 596 - RNA, 22 nt, synthetic construct
  source 1..22: mol_type = other RNA
cactgcctctcagtccctgtcc

SEQ ID NO: 597 - RNA, 22 nt, synthetic construct
  source 1..22: mol_type = other RNA
cactggttccctccagccgccg

SEQ ID NO: 598 - RNA, 22 nt, synthetic construct
  source 1..22: mol_type = other RNA
cagagagccgcgcttacccctg

SEQ ID NO: 599 - RNA, 22 nt, synthetic construct
  source 1..22: mol_type = other RNA
cagaggaccatgtccccgcggc

SEQ ID NO: 600 - RNA, 22 nt, synthetic construct
  source 1..22: mol_type = other RNA
cagcacgcgctccgcgcccact

SEQ ID NO: 601 - RNA, 22 nt, synthetic construct
  source 1..22: mol_type = other RNA
cagccgagtccccactccggag

SEQ ID NO: 602 - RNA, 22 nt, synthetic construct
  source 1..22: mol_type = other RNA
cagcggcgactccggagtgggg

SEQ ID NO: 603 - RNA, 22 nt, synthetic construct
  source 1..22: mol_type = other RNA
caggacagggactgagaggcag

SEQ ID NO: 604 - RNA, 22 nt, synthetic construct
  source 1..22: mol_type = other RNA
caggcggtccgcgccactgcct

SEQ ID NO: 605 - RNA, 22 nt, synthetic construct
  source 1..22: mol_type = other RNA
cagggactgagaggcagtggcg

SEQ ID NO: 606 - RNA, 22 nt, synthetic construct
  source 1..22: mol_type = other RNA
caggggtaagcgcggctctctg

SEQ ID NO: 607 - RNA, 22 nt, synthetic construct
  source 1..22: mol_type = other RNA
cagtccctgtcctgcgcccgcg

SEQ ID NO: 608 - RNA, 22 nt, synthetic construct
  source 1..22: mol_type = other RNA
cagtgggcgcggagcgcgtgct

SEQ ID NO: 609 - RNA, 22 nt, synthetic construct
  source 1..22: mol_type = other RNA
catggtcctctgcgttcagggg

SEQ ID NO: 610 - RNA, 22 nt, synthetic construct
  source 1..22: mol_type = other RNA
catgtccccgcggcagcggcga

SEQ ID NO: 611 - RNA, 22 nt, synthetic construct
  source 1..22: mol_type = other RNA
ccactccggagtcgccgctgcc

SEQ ID NO: 612 - RNA, 22 nt, synthetic construct
  source 1..22: mol_type = other RNA
ccactgcctctcagtccctgtc

SEQ ID NO: 613 - RNA, 22 nt, synthetic construct
  source 1..22: mol_type = other RNA
ccactggttccctccagccgcc

SEQ ID NO: 614 - RNA, 22 nt, synthetic construct
  source 1..22: mol_type = other RNA
ccagccgagtccccactccgga

SEQ ID NO: 615 - RNA, 22 nt, synthetic construct
  source 1..22: mol_type = other RNA
cccactccggagtcgccgctgc

SEQ ID NO: 616 - RNA, 22 nt, synthetic construct
  source 1..22: mol_type = other RNA
cccactggttccctccagccgc

SEQ ID NO: 617 - RNA, 22 nt, synthetic construct
  source 1..22: mol_type = other RNA
ccccactccggagtcgccgctg

SEQ ID NO: 618 - RNA, 22 nt, synthetic construct
  source 1..22: mol_type = other RNA
ccccgggagcctacccagcacg

SEQ ID NO: 619 - RNA, 22 nt, synthetic construct
  source 1..22: mol_type = other RNA
cccctgaacgcagaggaccatg

SEQ ID NO: 620 - RNA, 22 nt, synthetic construct
  source 1..22: mol_type = other RNA
cccgggagcctacccagcacgc

SEQ ID NO: 621 - RNA, 22 nt, synthetic construct
  source 1..22: mol_type = other RNA
ccctgaacgcagaggaccatgt

SEQ ID NO: 622 - RNA, 22 nt, synthetic construct
  source 1..22: mol_type = other RNA
ccgagtccccactccggagtcg

SEQ ID NO: 623 - RNA, 22 nt, synthetic construct
  source 1..22: mol_type = other RNA
ccgccgtccagccgagtcccca

SEQ ID NO: 624 - RNA, 22 nt, synthetic construct
  source 1..22: mol_type = other RNA
ccgcgccactgcctctcagtcc

SEQ ID NO: 625 - RNA, 22 nt, synthetic construct
  source 1..22: mol_type = other RNA
ccgcgcccactggttccctcca

SEQ ID NO: 626 - RNA, 22 nt, synthetic construct
  source 1..22: mol_type = other RNA
ccgcgcttacccctgaacgcag

SEQ ID NO: 627 - RNA, 22 nt, synthetic construct
  source 1..22: mol_type = other RNA
ccgcggggacatggtcctctgc

SEQ ID NO: 628 - RNA, 22 nt, synthetic construct
  source 1..22: mol_type = other RNA
ccgctgccgcggggacatggtc

SEQ ID NO: 629 - RNA, 22 nt, synthetic construct
  source 1..22: mol_type = other RNA
ccggagtggggactcggctgga

SEQ ID NO: 630 - RNA, 22 nt, synthetic construct
  source 1..22: mol_type = other RNA
ccgggaagggggcagagagccg

SEQ ID NO: 631 - RNA, 22 nt, synthetic construct
  source 1..22: mol_type = other RNA
ccgggagcctacccagcacgcg

SEQ ID NO: 632 - RNA, 22 nt, synthetic construct
  source 1..22: mol_type = other RNA
ccgtccagccgagtccccactc

SEQ ID NO: 633 - RNA, 22 nt, synthetic construct
  source 1..22: mol_type = other RNA
cctacccagcacgcgctccgcg

SEQ ID NO: 634 - RNA, 22 nt, synthetic construct
  source 1..22: mol_type = other RNA
cctctcagtccctgtcctgcgc

SEQ ID NO: 635 - RNA, 22 nt, synthetic construct
  source 1..22: mol_type = other RNA
cctctgcgttcaggggtaagcg

SEQ ID NO: 636 - RNA, 22 nt, synthetic construct
  source 1..22: mol_type = other RNA
cctgaacgcagaggaccatgtc

SEQ ID NO: 637 - RNA, 22 nt, synthetic construct
  source 1..22: mol_type = other RNA
cgactccggagtggggactcgg

SEQ ID NO: 638 - RNA, 22 nt, synthetic construct
  source 1..22: mol_type = other RNA
cgagtccccactccggagtcgc

SEQ ID NO: 639 - RNA, 22 nt, synthetic construct
  source 1..22: mol_type = other RNA
cgcagaggaccatgtccccgcg

SEQ ID NO: 640 - RNA, 22 nt, synthetic construct
  source 1..22: mol_type = other RNA
cgcaggacagggactgagaggc

SEQ ID NO: 641 - RNA, 22 nt, synthetic construct
  source 1..22: mol_type = other RNA
cgccactgcctctcagtccctg

SEQ ID NO: 642 - RNA, 22 nt, synthetic construct
  source 1..22: mol_type = other RNA
cgcccactggttccctccagcc

SEQ ID NO: 643 - RNA, 22 nt, synthetic construct
  source 1..22: mol_type = other RNA
cgccccgggagcctacccagca

SEQ ID NO: 644 - RNA, 22 nt, synthetic construct
  source 1..22: mol_type = other RNA
cgccgtccagccgagtccccac

SEQ ID NO: 645 - RNA, 22 nt, synthetic construct
  source 1..22: mol_type = other RNA
cgcgccactgcctctcagtccc

SEQ ID NO: 646 - RNA, 22 nt, synthetic construct
  source 1..22: mol_type = other RNA
cgcgcccactggttccctccag

SEQ ID NO: 647 - RNA, 22 nt, synthetic construct
  source 1..22: mol_type = other RNA
cgcgctccgcgcccactggttc

SEQ ID NO: 648 - RNA, 22 nt, synthetic construct
  source 1..22: mol_type = other RNA
cgcgcttacccctgaacgcaga

SEQ ID NO: 649 - RNA, 22 nt, synthetic construct
  source 1..22: mol_type = other RNA
cgcggagcgcgtgctgggtagg

SEQ ID NO: 650 - RNA, 22 nt, synthetic construct
  source 1..22: mol_type = other RNA
cgcgggcgcaggacagggactg

SEQ ID NO: 651 - RNA, 22 nt, synthetic construct
  source 1..22: mol_type = other RNA
cgcggggacatggtcctctgcg

SEQ ID NO: 652 - RNA, 22 nt, synthetic construct
  source 1..22: mol_type = other RNA
cgcgtgctgggtaggctcccgg

SEQ ID NO: 653 - RNA, 22 nt, synthetic construct
  source 1..22: mol_type = other RNA
cgctccgcgcccactggttccc

SEQ ID NO: 654 - RNA, 22 nt, synthetic construct
  source 1..22: mol_type = other RNA
cgctgccgcggggacatggtcc

SEQ ID NO: 655 - RNA, 22 nt, synthetic construct
  source 1..22: mol_type = other RNA
cgcttacccctgaacgcagagg

SEQ ID NO: 656 - RNA, 22 nt, synthetic construct
  source 1..22: mol_type = other RNA
cggagcgcgtgctgggtaggct

SEQ ID NO: 657 - RNA, 22 nt, synthetic construct
  source 1..22: mol_type = other RNA
cggagtggggactcggctggac

SEQ ID NO: 658 - RNA, 22 nt, synthetic construct
  source 1..22: mol_type = other RNA
cggcagcggcgactccggagtg

SEQ ID NO: 659 - RNA, 22 nt, synthetic construct
  source 1..22: mol_type = other RNA
cggcgactccggagtggggact

SEQ ID NO: 660 - RNA, 22 nt, synthetic construct
  source 1..22: mol_type = other RNA
cggcggcggctggagggaacca

SEQ ID NO: 661 - RNA, 22 nt, synthetic construct
  source 1..22: mol_type = other RNA
cggcggctggagggaaccagtg

SEQ ID NO: 662 - RNA, 22 nt, synthetic construct
  source 1..22: mol_type = other RNA
cggctggagggaaccagtgggc

SEQ ID NO: 663 - RNA, 22 nt, synthetic construct
  source 1..22: mol_type = other RNA
cgggaagggggcagagagccgc

SEQ ID NO: 664 - RNA, 22 nt, synthetic construct
  source 1..22: mol_type = other RNA
cgggagcctacccagcacgcgc

SEQ ID NO: 665 - RNA, 22 nt, synthetic construct
  source 1..22: mol_type = other RNA
cgggcgcaggacagggactgag

SEQ ID NO: 666 - RNA, 22 nt, synthetic construct
  source 1..22: mol_type = other RNA
cggggacatggtcctctgcgtt

SEQ ID NO: 667 - RNA, 22 nt, synthetic construct
  source 1..22: mol_type = other RNA
cggtccgcgccactgcctctca

SEQ ID NO: 668 - RNA, 22 nt, synthetic construct
  source 1..22: mol_type = other RNA
cgtccagccgagtccccactcc

SEQ ID NO: 669 - RNA, 22 nt, synthetic construct
  source 1..22: mol_type = other RNA
cgtgctgggtaggctcccgggg

SEQ ID NO: 670 - RNA, 22 nt, synthetic construct
  source 1..22: mol_type = other RNA
cgttcaggggtaagcgcggctc

SEQ ID NO: 671 - RNA, 22 nt, synthetic construct
  source 1..22: mol_type = other RNA
ctacccagcacgcgctccgcgc

SEQ ID NO: 672 - RNA, 22 nt, synthetic construct
  source 1..22: mol_type = other RNA
ctcagtccctgtcctgcgcccg

SEQ ID NO: 673 - RNA, 22 nt, synthetic construct
  source 1..22: mol_type = other RNA
ctccgcgcccactggttccctc

SEQ ID NO: 674 - RNA, 22 nt, synthetic construct
  source 1..22: mol_type = other RNA
ctccggagtggggactcggctg

SEQ ID NO: 675 - RNA, 22 nt, synthetic construct
  source 1..22: mol_type = other RNA
ctcgcaggcggtccgcgccact

SEQ ID NO: 676 - RNA, 22 nt, synthetic construct
  source 1..22: mol_type = other RNA
ctctcagtccctgtcctgcgcc

SEQ ID NO: 677 - RNA, 22 nt, synthetic construct
  source 1..22: mol_type = other RNA
ctctgcgttcaggggtaagcgc

SEQ ID NO: 678 - RNA, 22 nt, synthetic construct
  source 1..22: mol_type = other RNA
ctgaacgcagaggaccatgtcc

SEQ ID NO: 679 - RNA, 22 nt, synthetic construct
  source 1..22: mol_type = other RNA
ctgagaggcagtggcgcggacc

SEQ ID NO: 680 - RNA, 22 nt, synthetic construct
  source 1..22: mol_type = other RNA
ctgccgcggggacatggtcctc

SEQ ID NO: 681 - RNA, 22 nt, synthetic construct
  source 1..22: mol_type = other RNA
ctgcctctcagtccctgtcctg

SEQ ID NO: 682 - RNA, 22 nt, synthetic construct
  source 1..22: mol_type = other RNA
ctgcgttcaggggtaagcgcgg

SEQ ID NO: 683 - RNA, 22 nt, synthetic construct
  source 1..22: mol_type = other RNA
ctggagggaaccagtgggcgcg

SEQ ID NO: 684 - RNA, 22 nt, synthetic construct
  source 1..22: mol_type = other RNA
ctggttccctccagccgccgcc

SEQ ID NO: 685 - RNA, 22 nt, synthetic construct
  source 1..22: mol_type = other RNA
cttacccctgaacgcagaggac

SEQ ID NO: 686 - RNA, 22 nt, synthetic construct
  source 1..22: mol_type = other RNA
gaaccagtgggcgcggagcgcg

SEQ ID NO: 687 - RNA, 22 nt, synthetic construct
  source 1..22: mol_type = other RNA
gaacgcagaggaccatgtcccc

SEQ ID NO: 688 - RNA, 22 nt, synthetic construct
  source 1..22: mol_type = other RNA
gaagggggcagagagccgcgct

SEQ ID NO: 689 - RNA, 22 nt, synthetic construct
  source 1..22: mol_type = other RNA
gacagggactgagaggcagtgg

SEQ ID NO: 690 - RNA, 22 nt, synthetic construct
  source 1..22: mol_type = other RNA
gacatggtcctctgcgttcagg

SEQ ID NO: 691 - RNA, 22 nt, synthetic construct
  source 1..22: mol_type = other RNA
gaccatgtccccgcggcagcgg

SEQ ID NO: 692 - RNA, 22 nt, synthetic construct
  source 1..22: mol_type = other RNA
gacggcggcggctggagggaac

SEQ ID NO: 693 - RNA, 22 nt, synthetic construct
  source 1..22: mol_type = other RNA
gactccggagtggggactcggc

SEQ ID NO: 694 - RNA, 22 nt, synthetic construct
  source 1..22: mol_type = other RNA
gactgagaggcagtggcgcgga

SEQ ID NO: 695 - RNA, 22 nt, synthetic construct
  source 1..22: mol_type = other RNA
gagagccgcgcttacccctgaa

SEQ ID NO: 696 - RNA, 22 nt, synthetic construct
  source 1..22: mol_type = other RNA
gagaggcagtggcgcggaccgc

SEQ ID NO: 697 - RNA, 22 nt, synthetic construct
  source 1..22: mol_type = other RNA
gagccgcgcttacccctgaacg

SEQ ID NO: 698 - RNA, 22 nt, synthetic construct
  source 1..22: mol_type = other RNA
gagcctacccagcacgcgctcc

SEQ ID NO: 699 - RNA, 22 nt, synthetic construct
  source 1..22: mol_type = other RNA
gagcgcgtgctgggtaggctcc

SEQ ID NO: 700 - RNA, 22 nt, synthetic construct
  source 1..22: mol_type = other RNA
gaggaccatgtccccgcggcag

SEQ ID NO: 701 - RNA, 22 nt, synthetic construct
  source 1..22: mol_type = other RNA
gagggaaccagtgggcgcggag

SEQ ID NO: 702 - RNA, 22 nt, synthetic construct
  source 1..22: mol_type = other RNA
gagtccccactccggagtcgcc

SEQ ID NO: 703 - RNA, 22 nt, synthetic construct
  source 1..22: mol_type = other RNA
gagtggggactcggctggacgg

SEQ ID NO: 704 - RNA, 22 nt, synthetic construct
  source 1..22: mol_type = other RNA
gcagagagccgcgcttacccct

SEQ ID NO: 705 - RNA, 22 nt, synthetic construct
  source 1..22: mol_type = other RNA
gcagaggaccatgtccccgcgg

SEQ ID NO: 706 - RNA, 22 nt, synthetic construct
  source 1..22: mol_type = other RNA
gcagcggcgactccggagtggg

SEQ ID NO: 707 - RNA, 22 nt, synthetic construct
  source 1..22: mol_type = other RNA
gcaggacagggactgagaggca

SEQ ID NO: 708 - RNA, 22 nt, synthetic construct
  source 1..22: mol_type = other RNA
gccactgcctctcagtccctgt

SEQ ID NO: 709 - RNA, 22 nt, synthetic construct
  source 1..22: mol_type = other RNA
gcccactggttccctccagccg

SEQ ID NO: 710 - RNA, 22 nt, synthetic construct
  source 1..22: mol_type = other RNA
gccccgggagcctacccagcac

SEQ ID NO: 711 - RNA, 22 nt, synthetic construct
  source 1..22: mol_type = other RNA
gccgagtccccactccggagtc

SEQ ID NO: 712 - RNA, 22 nt, synthetic construct
  source 1..22: mol_type = other RNA
gccgcgcttacccctgaacgca

SEQ ID NO: 713 - RNA, 22 nt, synthetic construct
  source 1..22: mol_type = other RNA
gccgcggggacatggtcctctg

SEQ ID NO: 714 - RNA, 22 nt, synthetic construct
  source 1..22: mol_type = other RNA
gccgctgccgcggggacatggt

SEQ ID NO: 715 - RNA, 22 nt, synthetic construct
  source 1..22: mol_type = other RNA
gccgggaagggggcagagagcc

SEQ ID NO: 716 - RNA, 22 nt, synthetic construct
  source 1..22: mol_type = other RNA
gccgtccagccgagtccccact

SEQ ID NO: 717 - RNA, 22 nt, synthetic construct
  source 1..22: mol_type = other RNA
gcctacccagcacgcgctccgc

SEQ ID NO: 718 - RNA, 22 nt, synthetic construct
  source 1..22: mol_type = other RNA
gcctctcagtccctgtcctgcg

SEQ ID NO: 719 - RNA, 22 nt, synthetic construct
  source 1..22: mol_type = other RNA
gcgactccggagtggggactcg

SEQ ID NO: 720 - RNA, 22 nt, synthetic construct
  source 1..22: mol_type = other RNA
gcgcaggacagggactgagagg

SEQ ID NO: 721 - RNA, 22 nt, synthetic construct
  source 1..22: mol_type = other RNA
gcgccactgcctctcagtccct

SEQ ID NO: 722 - RNA, 22 nt, synthetic construct
  source 1..22: mol_type = other RNA
gcgcccactggttccctccagc

SEQ ID NO: 723 - RNA, 22 nt, synthetic construct
  source 1..22: mol_type = other RNA
gcgcggagcgcgtgctgggtag

SEQ ID NO: 724 - RNA, 22 nt, synthetic construct
  source 1..22: mol_type = other RNA
gcgcgggcgcaggacagggact

SEQ ID NO: 725 - RNA, 22 nt, synthetic construct
  source 1..22: mol_type = other RNA
gcgcgtgctgggtaggctcccg

SEQ ID NO: 726 - RNA, 22 nt, synthetic construct
  source 1..22: mol_type = other RNA
gcgctccgcgcccactggttcc

SEQ ID NO: 727 - RNA, 22 nt, synthetic construct
  source 1..22: mol_type = other RNA
gcgcttacccctgaacgcagag

SEQ ID NO: 728 - RNA, 22 nt, synthetic construct
  source 1..22: mol_type = other RNA
gcggagcgcgtgctgggtaggc

SEQ ID NO: 729 - RNA, 22 nt, synthetic construct
  source 1..22: mol_type = other RNA
gcggcagcggcgactccggagt

SEQ ID NO: 730 - RNA, 22 nt, synthetic construct
  source 1..22: mol_type = other RNA
gcggcgactccggagtggggac

SEQ ID NO: 731 - RNA, 22 nt, synthetic construct
  source 1..22: mol_type = other RNA
gcggcggctggagggaaccagt

SEQ ID NO: 732 - RNA, 22 nt, synthetic construct
  source 1..22: mol_type = other RNA
gcggctggagggaaccagtggg

SEQ ID NO: 733 - RNA, 22 nt, synthetic construct
  source 1..22: mol_type = other RNA
gcgggcgcaggacagggactga

SEQ ID NO: 734 - RNA, 22 nt, synthetic construct
  source 1..22: mol_type = other RNA
gcggggacatggtcctctgcgt

SEQ ID NO: 735 - RNA, 22 nt, synthetic construct
  source 1..22: mol_type = other RNA
gcggtccgcgccactgcctctc

SEQ ID NO: 736 - RNA, 22 nt, synthetic construct
  source 1..22: mol_type = other RNA
gcgtgctgggtaggctcccggg

SEQ ID NO: 737 - RNA, 22 nt, synthetic construct
  source 1..22: mol_type = other RNA
gcgttcaggggtaagcgcggct

SEQ ID NO: 738 - RNA, 22 nt, synthetic construct
  source 1..22: mol_type = other RNA
gctccgcgcccactggttccct

SEQ ID NO: 739 - RNA, 22 nt, synthetic construct
  source 1..22: mol_type = other RNA
gctgccgcggggacatggtcct

SEQ ID NO: 740 - RNA, 22 nt, synthetic construct
  source 1..22: mol_type = other RNA
gctggagggaaccagtgggcgc

SEQ ID NO: 741 - RNA, 22 nt, synthetic construct
  source 1..22: mol_type = other RNA
gcttacccctgaacgcagagga

SEQ ID NO: 742 - RNA, 22 nt, synthetic construct
  source 1..22: mol_type = other RNA
ggaaccagtgggcgcggagcgc

SEQ ID NO: 743 - RNA, 22 nt, synthetic construct
  source 1..22: mol_type = other RNA
ggaagggggcagagagccgcgc

SEQ ID NO: 744 - RNA, 22 nt, synthetic construct
  source 1..22: mol_type = other RNA
ggacagggactgagaggcagtg

SEQ ID NO: 745 - RNA, 22 nt, synthetic construct
  source 1..22: mol_type = other RNA
ggacatggtcctctgcgttcag

SEQ ID NO: 746 - RNA, 22 nt, synthetic construct
  source 1..22: mol_type = other RNA
ggaccatgtccccgcggcagcg

SEQ ID NO: 747 - RNA, 22 nt, synthetic construct
  source 1..22: mol_type = other RNA
ggacggcggcggctggagggaa

SEQ ID NO: 748 - RNA, 22 nt, synthetic construct
  source 1..22: mol_type = other RNA
ggactgagaggcagtggcgcgg

SEQ ID NO: 749 - RNA, 22 nt, synthetic construct
  source 1..22: mol_type = other RNA
ggagcctacccagcacgcgctc

SEQ ID NO: 750 - RNA, 22 nt, synthetic construct
  source 1..22: mol_type = other RNA
ggagcgcgtgctgggtaggctc

SEQ ID NO: 751 - RNA, 22 nt, synthetic construct
  source 1..22: mol_type = other RNA
ggagggaaccagtgggcgcgga

SEQ ID NO: 752 - RNA, 22 nt, synthetic construct
  source 1..22: mol_type = other RNA
ggagtggggactcggctggacg

SEQ ID NO: 753 - RNA, 22 nt, synthetic construct
  source 1..22: mol_type = other RNA
ggcagagagccgcgcttacccc

SEQ ID NO: 754 - RNA, 22 nt, synthetic construct
  source 1..22: mol_type = other RNA
ggcagcggcgactccggagtgg

SEQ ID NO: 755 - RNA, 22 nt, synthetic construct
  source 1..22: mol_type = other RNA
ggccgggaagggggcagagagc

SEQ ID NO: 756 - RNA, 22 nt, synthetic construct
  source 1..22: mol_type = other RNA
ggcgactccggagtggggactc

SEQ ID NO: 757 - RNA, 22 nt, synthetic construct
  source 1..22: mol_type = other RNA
ggcgcaggacagggactgagag

SEQ ID NO: 758 - RNA, 22 nt, synthetic construct
  source 1..22: mol_type = other RNA
ggcgcggagcgcgtgctgggta

SEQ ID NO: 759 - RNA, 22 nt, synthetic construct
  source 1..22: mol_type = other RNA
ggcggcggctggagggaaccag

SEQ ID NO: 760 - RNA, 22 nt, synthetic construct
  source 1..22: mol_type = other RNA
ggcggctggagggaaccagtgg

SEQ ID NO: 761 - RNA, 22 nt, synthetic construct
  source 1..22: mol_type = other RNA
ggcggtccgcgccactgcctct

SEQ ID NO: 762 - RNA, 22 nt, synthetic construct
  source 1..22: mol_type = other RNA
ggctggagggaaccagtgggcg

SEQ ID NO: 763 - RNA, 22 nt, synthetic construct
  source 1..22: mol_type = other RNA
gggaaccagtgggcgcggagcg

SEQ ID NO: 764 - RNA, 22 nt, synthetic construct
  source 1..22: mol_type = other RNA
gggaagggggcagagagccgcg

SEQ ID NO: 765 - RNA, 22 nt, synthetic construct
  source 1..22: mol_type = other RNA
gggacatggtcctctgcgttca

SEQ ID NO: 766 - RNA, 22 nt, synthetic construct
  source 1..22: mol_type = other RNA
gggactgagaggcagtggcgcg

SEQ ID NO: 767 - RNA, 22 nt, synthetic construct
  source 1..22: mol_type = other RNA
gggagcctacccagcacgcgct

SEQ ID NO: 768 - RNA, 22 nt, synthetic construct
  source 1..22: mol_type = other RNA
gggcagagagccgcgcttaccc

SEQ ID NO: 769 - RNA, 22 nt, synthetic construct
  source 1..22: mol_type = other RNA
gggcgcaggacagggactgaga

SEQ ID NO: 770 - RNA, 22 nt, synthetic construct
  source 1..22: mol_type = other RNA
ggggacatggtcctctgcgttc

SEQ ID NO: 771 - RNA, 22 nt, synthetic construct
  source 1..22: mol_type = other RNA
ggggcagagagccgcgcttacc

SEQ ID NO: 772 - RNA, 22 nt, synthetic construct
  source 1..22: mol_type = other RNA
gggggcagagagccgcgcttac

SEQ ID NO: 773 - RNA, 22 nt, synthetic construct
  source 1..22: mol_type = other RNA
ggggtaagcgcggctctctgcc

SEQ ID NO: 774 - RNA, 22 nt, synthetic construct
  source 1..22: mol_type = other RNA
gggtaagcgcggctctctgccc

SEQ ID NO: 775 - RNA, 22 nt, synthetic construct
  source 1..22: mol_type = other RNA
ggtaagcgcggctctctgcccc

SEQ ID NO: 776 - RNA, 22 nt, synthetic construct
  source 1..22: mol_type = other RNA
ggtccgcgccactgcctctcag

SEQ ID NO: 777 - RNA, 22 nt, synthetic construct
  source 1..22: mol_type = other RNA
ggtcctctgcgttcaggggtaa

SEQ ID NO: 778 - RNA, 22 nt, synthetic construct
  source 1..22: mol_type = other RNA
ggttccctccagccgccgccgt

SEQ ID NO: 779 - RNA, 22 nt, synthetic construct
  source 1..22: mol_type = other RNA
gtaagcgcggctctctgccccc

SEQ ID NO: 780 - RNA, 22 nt, synthetic construct
  source 1..22: mol_type = other RNA
gtccagccgagtccccactccg

SEQ ID NO: 781 - RNA, 22 nt, synthetic construct
  source 1..22: mol_type = other RNA
gtccccactccggagtcgccgc

SEQ ID NO: 782 - RNA, 22 nt, synthetic construct
  source 1..22: mol_type = other RNA
gtccgcgccactgcctctcagt

SEQ ID NO: 783 - RNA, 22 nt, synthetic construct
  source 1..22: mol_type = other RNA
gtcctctgcgttcaggggtaag

SEQ ID NO: 784 - RNA, 22 nt, synthetic construct
  source 1..22: mol_type = other RNA
gtcgccgctgccgcggggacat

SEQ ID NO: 785 - RNA, 22 nt, synthetic construct
  source 1..22: mol_type = other RNA
gtgctgggtaggctcccggggc

SEQ ID NO: 786 - RNA, 22 nt, synthetic construct
  source 1..22: mol_type = other RNA
gtggggactcggctggacggcg

SEQ ID NO: 787 - RNA, 22 nt, synthetic construct
  source 1..22: mol_type = other RNA
gttcaggggtaagcgcggctct

SEQ ID NO: 788 - RNA, 22 nt, synthetic construct
  source 1..22: mol_type = other RNA
gttccctccagccgccgccgtc

SEQ ID NO: 789 - RNA, 22 nt, synthetic construct
  source 1..22: mol_type = other RNA
taagcgcggctctctgccccct

SEQ ID NO: 790 - RNA, 22 nt, synthetic construct
  source 1..22: mol_type = other RNA
tacccagcacgcgctccgcgcc

SEQ ID NO: 791 - RNA, 22 nt, synthetic construct
  source 1..22: mol_type = other RNA
tacccctgaacgcagaggacca

SEQ ID NO: 792 - RNA, 22 nt, synthetic construct
  source 1..22: mol_type = other RNA
tcaggggtaagcgcggctctct

SEQ ID NO: 793 - RNA, 22 nt, synthetic construct
  source 1..22: mol_type = other RNA
tcagtccctgtcctgcgcccgc

SEQ ID NO: 794 - RNA, 22 nt, synthetic construct
  source 1..22: mol_type = other RNA
tccagccgagtccccactccgg

SEQ ID NO: 795 - RNA, 22 nt, synthetic construct
  source 1..22: mol_type = other RNA
tccccactccggagtcgccgct

SEQ ID NO: 796 - RNA, 22 nt, synthetic construct
  source 1..22: mol_type = other RNA
tccctccagccgccgccgtcca

SEQ ID NO: 797 - RNA, 22 nt, synthetic construct
  source 1..22: mol_type = other RNA
tccgcgccactgcctctcagtc

SEQ ID NO: 798 - RNA, 22 nt, synthetic construct
  source 1..22: mol_type = other RNA
tccgcgcccactggttccctcc

SEQ ID NO: 799 - RNA, 22 nt, synthetic construct
  source 1..22: mol_type = other RNA
tccggagtggggactcggctgg

SEQ ID NO: 800 - RNA, 22 nt, synthetic construct
  source 1..22: mol_type = other RNA
tcctctgcgttcaggggtaagc

SEQ ID NO: 801 - RNA, 22 nt, synthetic construct
  source 1..22: mol_type = other RNA
tcgcaggcggtccgcgccactg

SEQ ID NO: 802 - RNA, 22 nt, synthetic construct
  source 1..22: mol_type = other RNA
tcgccgctgccgcggggacatg

SEQ ID NO: 803 - RNA, 22 nt, synthetic construct
  source 1..22: mol_type = other RNA
tctcagtccctgtcctgcgccc

SEQ ID NO: 804 - RNA, 22 nt, synthetic construct
  source 1..22: mol_type = other RNA
tctgcgttcaggggtaagcgcg

SEQ ID NO: 805 - RNA, 22 nt, synthetic construct
  source 1..22: mol_type = other RNA
tgaacgcagaggaccatgtccc

SEQ ID NO: 806 - RNA, 22 nt, synthetic construct
  source 1..22: mol_type = other RNA
tgagaggcagtggcgcggaccg

SEQ ID NO: 807 - RNA, 22 nt, synthetic construct
  source 1..22: mol_type = other RNA
tgccgcggggacatggtcctct

SEQ ID NO: 808 - RNA, 22 nt, synthetic construct
  source 1..22: mol_type = other RNA
tgcctctcagtccctgtcctgc

SEQ ID NO: 809 - RNA, 22 nt, synthetic construct
  source 1..22: mol_type = other RNA
tgcgttcaggggtaagcgcggc

SEQ ID NO: 810 - RNA, 22 nt, synthetic construct
  source 1..22: mol_type = other RNA
tgctgggtaggctcccggggcg

SEQ ID NO: 811 - RNA, 22 nt, synthetic construct
  source 1..22: mol_type = other RNA
tggacggcggcggctggaggga

SEQ ID NO: 812 - RNA, 22 nt, synthetic construct
  source 1..22: mol_type = other RNA
tggagggaaccagtgggcgcgg

SEQ ID NO: 813 - RNA, 22 nt, synthetic construct
  source 1..22: mol_type = other RNA
tggccgggaagggggcagagag

SEQ ID NO: 814 - RNA, 22 nt, synthetic construct
  source 1..22: mol_type = other RNA
tggggactcggctggacggcgg

SEQ ID NO: 815 - RNA, 22 nt, synthetic construct
  source 1..22: mol_type = other RNA
tggtcctctgcgttcaggggta

SEQ ID NO: 816 - RNA, 22 nt, synthetic construct
  source 1..22: mol_type = other RNA
tggttccctccagccgccgccg

SEQ ID NO: 817 - RNA, 22 nt, synthetic construct
  source 1..22: mol_type = other RNA
tgtccccgcggcagcggcgact

SEQ ID NO: 818 - RNA, 22 nt, synthetic construct
  source 1..22: mol_type = other RNA
ttacccctgaacgcagaggacc

SEQ ID NO: 819 - RNA, 22 nt, synthetic construct
  source 1..22: mol_type = other RNA
ttcaggggtaagcgcggctctc

SEQ ID NO: 820 - RNA, 22 nt, synthetic construct
  source 1..22: mol_type = other RNA
ttccctccagccgccgccgtcc

SEQ ID NO: 821 - RNA, 20 nt, synthetic construct
  source 1..20: mol_type = other RNA
aaaaggcctgcctcccccct

SEQ ID NO: 822 - RNA, 20 nt, synthetic construct
  source 1..20: mol_type = other RNA
aaaggacgaggtctagaagg

SEQ ID NO: 823 - RNA, 20 nt, synthetic construct
  source 1..20: mol_type = other RNA
aaaggcctgcctcccccctc

SEQ ID NO: 824 - RNA, 20 nt, synthetic construct
  source 1..20: mol_type = other RNA
aaaggtgctggacccagagg

SEQ ID NO: 825 - RNA, 20 nt, synthetic construct
  source 1..20: mol_type = other RNA
aactgcccaagccagtcatg

SEQ ID NO: 826 - RNA, 20 nt, synthetic construct
  source 1..20: mol_type = other RNA
aagaccttctcctaccttcg

SEQ ID NO: 827 - RNA, 20 nt, synthetic construct
  source 1..20: mol_type = other RNA
aagccagtcatgcagccctt

SEQ ID NO: 828 - RNA, 20 nt, synthetic construct
  source 1..20: mol_type = other RNA
aaggacgaggtctagaaggc

SEQ ID NO: 829 - RNA, 20 nt, synthetic construct
  source 1..20: mol_type = other RNA
aaggccccagcaggcaaggg

SEQ ID NO: 830 - RNA, 20 nt, synthetic construct
  source 1..20: mol_type = other RNA
aaggcctgcctcccccctca

SEQ ID NO: 831 - RNA, 20 nt, synthetic construct
  source 1..20: mol_type = other RNA
aagggctgcatgactggctt

SEQ ID NO: 832 - RNA, 20 nt, synthetic construct
  source 1..20: mol_type = other RNA
aaggtaggagaaggtcttgg

SEQ ID NO: 833 - RNA, 20 nt, synthetic construct
  source 1..20: mol_type = other RNA
aaggtcttggctatgcacag

SEQ ID NO: 834 - RNA, 20 nt, synthetic construct
  source 1..20: mol_type = other RNA
aaggtgctggacccagagga

SEQ ID NO: 835 - RNA, 20 nt, synthetic construct
  source 1..20: mol_type = other RNA
aatctggtgagtctgagggg

SEQ ID NO: 836 - RNA, 20 nt, synthetic construct
  source 1..20: mol_type = other RNA
acagagagtgagccaaaggt

SEQ ID NO: 837 - RNA, 20 nt, synthetic construct
  source 1..20: mol_type = other RNA
acagcagatcctcctctggg

SEQ ID NO: 838 - RNA, 20 nt, synthetic construct
  source 1..20: mol_type = other RNA
acagccagcaaaggacgagg

SEQ ID NO: 839 - RNA, 20 nt, synthetic construct
  source 1..20: mol_type = other RNA
acaggggccgctgcccagtc

SEQ ID NO: 840 - RNA, 20 nt, synthetic construct
  source 1..20: mol_type = other RNA
accagattcccgaaggtagg

SEQ ID NO: 841 - RNA, 20 nt, synthetic construct
  source 1..20: mol_type = other RNA
acccagaggaggatctgctg

SEQ ID NO: 842 - RNA, 20 nt, synthetic construct
  source 1..20: mol_type = other RNA
accccagcccagacagagag

SEQ ID NO: 843 - RNA, 20 nt, synthetic construct
  source 1..20: mol_type = other RNA
accctctgccacctcctcga

SEQ ID NO: 844 - RNA, 20 nt, synthetic construct
  source 1..20: mol_type = other RNA
acctcctcgaggaaggcccc

SEQ ID NO: 845 - RNA, 20 nt, synthetic construct
  source 1..20: mol_type = other RNA
acctcgtcctttgctggctg

SEQ ID NO: 846 - RNA, 20 nt, synthetic construct
  source 1..20: mol_type = other RNA
accttcgggaatctggtgag

SEQ ID NO: 847 - RNA, 20 nt, synthetic construct
  source 1..20: mol_type = other RNA
accttctcctaccttcggga

SEQ ID NO: 848 - RNA, 20 nt, synthetic construct
  source 1..20: mol_type = other RNA
acctttggctcactctctgt

SEQ ID NO: 849 - RNA, 20 nt, synthetic construct
  source 1..20: mol_type = other RNA
acgaggtctagaaggcagtg

SEQ ID NO: 850 - RNA, 20 nt, synthetic construct
  source 1..20: mol_type = other RNA
actcaccagattcccgaagg

SEQ ID NO: 851 - RNA, 20 nt, synthetic construct
  source 1..20: mol_type = other RNA
actcactgctcatccactgc

SEQ ID NO: 852 - RNA, 20 nt, synthetic construct
  source 1..20: mol_type = other RNA
actctctgtctgggctgggg

SEQ ID NO: 853 - RNA, 20 nt, synthetic construct
  source 1..20: mol_type = other RNA
actgcccaagccagtcatgc

SEQ ID NO: 854 - RNA, 20 nt, synthetic construct
  source 1..20: mol_type = other RNA
actgccttctagacctcgtc

SEQ ID NO: 855 - RNA, 20 nt, synthetic construct
  source 1..20: mol_type = other RNA
actgctcatccactgccttc

SEQ ID NO: 856 - RNA, 20 nt, synthetic construct
  source 1..20: mol_type = other RNA
actggcttgggcagttccag

SEQ ID NO: 857 - RNA, 20 nt, synthetic construct
  source 1..20: mol_type = other RNA
actgggcagcggcccctgtg

SEQ ID NO: 858 - RNA, 20 nt, synthetic construct
  source 1..20: mol_type = other RNA
agaaggcagtggatgagcag

SEQ ID NO: 859 - RNA, 20 nt, synthetic construct
  source 1..20: mol_type = other RNA
agaaggtcttggctatgcac

SEQ ID NO: 860 - RNA, 20 nt, synthetic construct
  source 1..20: mol_type = other RNA
agacagagagtgagccaaag

SEQ ID NO: 861 - RNA, 20 nt, synthetic construct
  source 1..20: mol_type = other RNA
agacctcgtcctttgctggc

SEQ ID NO: 862 - RNA, 20 nt, synthetic construct
  source 1..20: mol_type = other RNA
agaccttctcctaccttcgg

SEQ ID NO: 863 - RNA, 20 nt, synthetic construct
  source 1..20: mol_type = other RNA
agactcaccagattcccgaa

SEQ ID NO: 864 - RNA, 20 nt, synthetic construct
  source 1..20: mol_type = other RNA
agagagtgagccaaaggtgc

SEQ ID NO: 865 - RNA, 20 nt, synthetic construct
  source 1..20: mol_type = other RNA
agaggaggatctgctgtgca

SEQ ID NO: 866 - RNA, 20 nt, synthetic construct
  source 1..20: mol_type = other RNA
agagggtaccccagcccaga

SEQ ID NO: 867 - RNA, 20 nt, synthetic construct
  source 1..20: mol_type = other RNA
agagtgagccaaaggtgctg

SEQ ID NO: 868 - RNA, 20 nt, synthetic construct
  source 1..20: mol_type = other RNA
agatcctcctctgggtccag

SEQ ID NO: 869 - RNA, 20 nt, synthetic construct
  source 1..20: mol_type = other RNA
agattcccgaaggtaggaga

SEQ ID NO: 870 - RNA, 20 nt, synthetic construct
  source 1..20: mol_type = other RNA
agcaaaggacgaggtctaga

SEQ ID NO: 871 - RNA, 20 nt, synthetic construct
  source 1..20: mol_type = other RNA
agcacctttggctcactctc

SEQ ID NO: 872 - RNA, 20 nt, synthetic construct
  source 1..20: mol_type = other RNA
agcagatcctcctctgggtc

SEQ ID NO: 873 - RNA, 20 nt, synthetic construct
  source 1..20: mol_type = other RNA
agcaggcaagggctgcatga

SEQ ID NO: 874 - RNA, 20 nt, synthetic construct
  source 1..20: mol_type = other RNA
agccaaaggtgctggaccca

SEQ ID NO: 875 - RNA, 20 nt, synthetic construct
  source 1..20: mol_type = other RNA
agccaagaccttctcctacc

SEQ ID NO: 876 - RNA, 20 nt, synthetic construct
  source 1..20: mol_type = other RNA
agccagcaaaggacgaggtc

SEQ ID NO: 877 - RNA, 20 nt, synthetic construct
  source 1..20: mol_type = other RNA
agccagtcatgcagcccttg

SEQ ID NO: 878 - RNA, 20 nt, synthetic construct
  source 1..20: mol_type = other RNA
agcccagacagagagtgagc

SEQ ID NO: 879 - RNA, 20 nt, synthetic construct
  source 1..20: mol_type = other RNA
agcccttgcctgctggggcc

SEQ ID NO: 880 - RNA, 20 nt, synthetic construct
  source 1..20: mol_type = other RNA
agcggactgggcagcggccc

SEQ ID NO: 881 - RNA, 20 nt, synthetic construct
  source 1..20: mol_type = other RNA
aggaaaaggcctgcctcccc

SEQ ID NO: 882 - RNA, 20 nt, synthetic construct
  source 1..20: mol_type = other RNA
aggaaggccccagcaggcaa

SEQ ID NO: 883 - RNA, 20 nt, synthetic construct
  source 1..20: mol_type = other RNA
aggacgaggtctagaaggca

SEQ ID NO: 884 - RNA, 20 nt, synthetic construct
  source 1..20: mol_type = other RNA
aggagaaggtcttggctatg

SEQ ID NO: 885 - RNA, 20 nt, synthetic construct
  source 1..20: mol_type = other RNA
aggaggatctgctgtgcata

SEQ ID NO: 886 - RNA, 20 nt, synthetic construct
  source 1..20: mol_type = other RNA
aggaggtggcagagggtacc

SEQ ID NO: 887 - RNA, 20 nt, synthetic construct
  source 1..20: mol_type = other RNA
aggatctgctgtgcatagcc

SEQ ID NO: 888 - RNA, 20 nt, synthetic construct
  source 1..20: mol_type = other RNA
aggcaagggctgcatgactg

SEQ ID NO: 889 - RNA, 20 nt, synthetic construct
  source 1..20: mol_type = other RNA
aggccccagcaggcaagggc

SEQ ID NO: 890 - RNA, 20 nt, synthetic construct
  source 1..20: mol_type = other RNA
aggcctgcctcccccctcag

SEQ ID NO: 891 - RNA, 20 nt, synthetic construct
  source 1..20: mol_type = other RNA
agggacggggcccacagggg

SEQ ID NO: 892 - RNA, 20 nt, synthetic construct
  source 1..20: mol_type = other RNA
agggctgcatgactggcttg

SEQ ID NO: 893 - RNA, 20 nt, synthetic construct
  source 1..20: mol_type = other RNA
aggggccgctgcccagtccg

SEQ ID NO: 894 - RNA, 20 nt, synthetic construct
  source 1..20: mol_type = other RNA
agggtaccccagcccagaca

SEQ ID NO: 895 - RNA, 20 nt, synthetic construct
  source 1..20: mol_type = other RNA
aggtaggagaaggtcttggc

SEQ ID NO: 896 - RNA, 20 nt, synthetic construct
  source 1..20: mol_type = other RNA
aggtctagaaggcagtggat

SEQ ID NO: 897 - RNA, 20 nt, synthetic construct
  source 1..20: mol_type = other RNA
aggtcttggctatgcacagc

SEQ ID NO: 898 - RNA, 20 nt, synthetic construct
  source 1..20: mol_type = other RNA
aggtgctggacccagaggag

SEQ ID NO: 899 - RNA, 20 nt, synthetic construct
  source 1..20: mol_type = other RNA
aggtggcagagggtacccca

SEQ ID NO: 900 - RNA, 20 nt, synthetic construct
  source 1..20: mol_type = other RNA
agtcatgcagcccttgcctg

SEQ ID NO: 901 - RNA, 20 nt, synthetic construct
  source 1..20: mol_type = other RNA
agtccgctccacagccagca

SEQ ID NO: 902 - RNA, 20 nt, synthetic construct
  source 1..20: mol_type = other RNA
agtctgaggggggaggcagg

SEQ ID NO: 903 - RNA, 20 nt, synthetic construct
  source 1..20: mol_type = other RNA
agtgagccaaaggtgctgga

SEQ ID NO: 904 - RNA, 20 nt, synthetic construct
  source 1..20: mol_type = other RNA
agttccagggacggggccca

SEQ ID NO: 905 - RNA, 20 nt, synthetic construct
  source 1..20: mol_type = other RNA
atagccaagaccttctccta

SEQ ID NO: 906 - RNA, 20 nt, synthetic construct
  source 1..20: mol_type = other RNA
atccactgccttctagacct

SEQ ID NO: 907 - RNA, 20 nt, synthetic construct
  source 1..20: mol_type = other RNA
atcctcctctgggtccagca

SEQ ID NO: 908 - RNA, 20 nt, synthetic construct
  source 1..20: mol_type = other RNA
atctgctgtgcatagccaag

SEQ ID NO: 909 - RNA, 20 nt, synthetic construct
  source 1..20: mol_type = other RNA
atctggtgagtctgaggggg

SEQ ID NO: 910 - RNA, 20 nt, synthetic construct
  source 1..20: mol_type = other RNA
atgactggcttgggcagttc

SEQ ID NO: 911 - RNA, 20 nt, synthetic construct
  source 1..20: mol_type = other RNA
atgcacagcagatcctcctc

SEQ ID NO: 912 - RNA, 20 nt, synthetic construct
  source 1..20: mol_type = other RNA
atgcagcccttgcctgctgg

SEQ ID NO: 913 - RNA, 20 nt, synthetic construct
  source 1..20: mol_type = other RNA
attcccgaaggtaggagaag

SEQ ID NO: 914 - RNA, 20 nt, synthetic construct
  source 1..20: mol_type = other RNA
caaaggacgaggtctagaag

SEQ ID NO: 915 - RNA, 20 nt, synthetic construct
  source 1..20: mol_type = other RNA
caaaggtgctggacccagag

SEQ ID NO: 916 - RNA, 20 nt, synthetic construct
  source 1..20: mol_type = other RNA
caagaccttctcctaccttc

SEQ ID NO: 917 - RNA, 20 nt, synthetic construct
  source 1..20: mol_type = other RNA
caagccagtcatgcagccct

SEQ ID NO: 918 - RNA, 20 nt, synthetic construct
  source 1..20: mol_type = other RNA
caagggctgcatgactggct

SEQ ID NO: 919 - RNA, 20 nt, synthetic construct
  source 1..20: mol_type = other RNA
cacagcagatcctcctctgg

SEQ ID NO: 920 - RNA, 20 nt, synthetic construct
  source 1..20: mol_type = other RNA
cacagccagcaaaggacgag

SEQ ID NO: 921 - RNA, 20 nt, synthetic construct
  source 1..20: mol_type = other RNA
cacaggggccgctgcccagt

SEQ ID NO: 922 - RNA, 20 nt, synthetic construct
  source 1..20: mol_type = other RNA
caccagattcccgaaggtag

SEQ ID NO: 923 - RNA, 20 nt, synthetic construct
  source 1..20: mol_type = other RNA
cacctcctcgaggaaggccc

SEQ ID NO: 924 - RNA, 20 nt, synthetic construct
  source 1..20: mol_type = other RNA
cacctttggctcactctctg

SEQ ID NO: 925 - RNA, 20 nt, synthetic construct
  source 1..20: mol_type = other RNA
cactcactgctcatccactg

SEQ ID NO: 926 - RNA, 20 nt, synthetic construct
  source 1..20: mol_type = other RNA
cactctctgtctgggctggg

SEQ ID NO: 927 - RNA, 20 nt, synthetic construct
  source 1..20: mol_type = other RNA
cactgccttctagacctcgt

SEQ ID NO: 928 - RNA, 20 nt, synthetic construct
  source 1..20: mol_type = other RNA
cactgctcatccactgcctt

SEQ ID NO: 929 - RNA, 20 nt, synthetic construct
  source 1..20: mol_type = other RNA
cagacagagagtgagccaaa

SEQ ID NO: 930 - RNA, 20 nt, synthetic construct
  source 1..20: mol_type = other RNA
cagactcaccagattcccga

SEQ ID NO: 931 - RNA, 20 nt, synthetic construct
  source 1..20: mol_type = other RNA
cagagagtgagccaaaggtg

SEQ ID NO: 932 - RNA, 20 nt, synthetic construct
  source 1..20: mol_type = other RNA
cagaggaggatctgctgtgc

SEQ ID NO: 933 - RNA, 20 nt, synthetic construct
  source 1..20: mol_type = other RNA
cagagggtaccccagcccag

SEQ ID NO: 934 - RNA, 20 nt, synthetic construct
  source 1..20: mol_type = other RNA
cagatcctcctctgggtcca

SEQ ID NO: 935 - RNA, 20 nt, synthetic construct
  source 1..20: mol_type = other RNA
cagattcccgaaggtaggag

SEQ ID NO: 936 - RNA, 20 nt, synthetic construct
  source 1..20: mol_type = other RNA
cagcaaaggacgaggtctag

SEQ ID NO: 937 - RNA, 20 nt, synthetic construct
  source 1..20: mol_type = other RNA
cagcacctttggctcactct

SEQ ID NO: 938 - RNA, 20 nt, synthetic construct
  source 1..20: mol_type = other RNA
cagcagatcctcctctgggt

SEQ ID NO: 939 - RNA, 20 nt, synthetic construct
  source 1..20: mol_type = other RNA
cagcaggcaagggctgcatg

SEQ ID NO: 940 - RNA, 20 nt, synthetic construct
  source 1..20: mol_type = other RNA
cagccagcaaaggacgaggt

SEQ ID NO: 941 - RNA, 20 nt, synthetic construct
  source 1..20: mol_type = other RNA
cagcccagacagagagtgag

SEQ ID NO: 942 - RNA, 20 nt, synthetic construct
  source 1..20: mol_type = other RNA
cagcccttgcctgctggggc

SEQ ID NO: 943 - RNA, 20 nt, synthetic construct
  source 1..20: mol_type = other RNA
caggcaagggctgcatgact

SEQ ID NO: 944 - RNA, 20 nt, synthetic construct
  source 1..20: mol_type = other RNA
cagggacggggcccacaggg

SEQ ID NO: 945 - RNA, 20 nt, synthetic construct
  source 1..20: mol_type = other RNA
caggggccgctgcccagtcc

SEQ ID NO: 946 - RNA, 20 nt, synthetic construct
  source 1..20: mol_type = other RNA
cagtcatgcagcccttgcct

SEQ ID NO: 947 - RNA, 20 nt, synthetic construct
  source 1..20: mol_type = other RNA
cagtccgctccacagccagc

SEQ ID NO: 948 - RNA, 20 nt, synthetic construct
  source 1..20: mol_type = other RNA
cagttccagggacggggccc

SEQ ID NO: 949 - RNA, 20 nt, synthetic construct
  source 1..20: mol_type = other RNA
catagccaagaccttctcct

SEQ ID NO: 950 - RNA, 20 nt, synthetic construct
  source 1..20: mol_type = other RNA
catccactgccttctagacc

SEQ ID NO: 951 - RNA, 20 nt, synthetic construct
  source 1..20: mol_type = other RNA
catgactggcttgggcagtt

SEQ ID NO: 952 - RNA, 20 nt, synthetic construct
  source 1..20: mol_type = other RNA
catgcagcccttgcctgctg

SEQ ID NO: 953 - RNA, 20 nt, synthetic construct
  source 1..20: mol_type = other RNA
ccaaaggtgctggacccaga

SEQ ID NO: 954 - RNA, 20 nt, synthetic construct
  source 1..20: mol_type = other RNA
ccaagaccttctcctacctt

SEQ ID NO: 955 - RNA, 20 nt, synthetic construct
  source 1..20: mol_type = other RNA
ccaagccagtcatgcagccc

SEQ ID NO: 956 - RNA, 20 nt, synthetic construct
  source 1..20: mol_type = other RNA
ccacagccagcaaaggacga

SEQ ID NO: 957 - RNA, 20 nt, synthetic construct
  source 1..20: mol_type = other RNA
ccacaggggccgctgcccag

SEQ ID NO: 958 - RNA, 20 nt, synthetic construct
  source 1..20: mol_type = other RNA
ccacctcctcgaggaaggcc

SEQ ID NO: 959 - RNA, 20 nt, synthetic construct
  source 1..20: mol_type = other RNA
ccactcactgctcatccact

SEQ ID NO: 960 - RNA, 20 nt, synthetic construct
  source 1..20: mol_type = other RNA
ccactgccttctagacctcg

SEQ ID NO: 961 - RNA, 20 nt, synthetic construct
  source 1..20: mol_type = other RNA
ccagacagagagtgagccaa

SEQ ID NO: 962 - RNA, 20 nt, synthetic construct
  source 1..20: mol_type = other RNA
ccagaggaggatctgctgtg

SEQ ID NO: 963 - RNA, 20 nt, synthetic construct
  source 1..20: mol_type = other RNA
ccagattcccgaaggtagga

SEQ ID NO: 964 - RNA, 20 nt, synthetic construct
  source 1..20: mol_type = other RNA
ccagcaaaggacgaggtcta

SEQ ID NO: 965 - RNA, 20 nt, synthetic construct
  source 1..20: mol_type = other RNA
ccagcacctttggctcactc

SEQ ID NO: 966 - RNA, 20 nt, synthetic construct
  source 1..20: mol_type = other RNA
ccagcaggcaagggctgcat

SEQ ID NO: 967 - RNA, 20 nt, synthetic construct
  source 1..20: mol_type = other RNA
ccagcccagacagagagtga

SEQ ID NO: 968 - RNA, 20 nt, synthetic construct
  source 1..20: mol_type = other RNA
ccagggacggggcccacagg

SEQ ID NO: 969 - RNA, 20 nt, synthetic construct
  source 1..20: mol_type = other RNA
ccagtcatgcagcccttgcc

SEQ ID NO: 970 - RNA, 20 nt, synthetic construct
  source 1..20: mol_type = other RNA
ccagtccgctccacagccag

SEQ ID NO: 971 - RNA, 20 nt, synthetic construct
  source 1..20: mol_type = other RNA
cccaagccagtcatgcagcc

SEQ ID NO: 972 - RNA, 20 nt, synthetic construct
  source 1..20: mol_type = other RNA
cccacaggggccgctgccca

SEQ ID NO: 973 - RNA, 20 nt, synthetic construct
  source 1..20: mol_type = other RNA
cccagacagagagtgagcca

SEQ ID NO: 974 - RNA, 20 nt, synthetic construct
  source 1..20: mol_type = other RNA
cccagaggaggatctgctgt

SEQ ID NO: 975 - RNA, 20 nt, synthetic construct
  source 1..20: mol_type = other RNA
cccagcaggcaagggctgca

SEQ ID NO: 976 - RNA, 20 nt, synthetic construct
  source 1..20: mol_type = other RNA
cccagcccagacagagagtg

SEQ ID NO: 977 - RNA, 20 nt, synthetic construct
  source 1..20: mol_type = other RNA
cccagtccgctccacagcca

SEQ ID NO: 978 - RNA, 20 nt, synthetic construct
  source 1..20: mol_type = other RNA
ccccagcaggcaagggctgc

SEQ ID NO: 979 - RNA, 20 nt, synthetic construct
  source 1..20: mol_type = other RNA
ccccagcccagacagagagt

SEQ ID NO: 980 - RNA, 20 nt, synthetic construct
  source 1..20: mol_type = other RNA
cccccctcagactcaccaga

SEQ ID NO: 981 - RNA, 20 nt, synthetic construct
  source 1..20: mol_type = other RNA
ccccctcagactcaccagat

SEQ ID NO: 982 - RNA, 20 nt, synthetic construct
  source 1..20: mol_type = other RNA
ccccgtccctggaactgccc

SEQ ID NO: 983 - RNA, 20 nt, synthetic construct
  source 1..20: mol_type = other RNA
cccctcagactcaccagatt

SEQ ID NO: 984 - RNA, 20 nt, synthetic construct
  source 1..20: mol_type = other RNA
cccctgtgggccccgtccct

SEQ ID NO: 985 - RNA, 20 nt, synthetic construct
  source 1..20: mol_type = other RNA
cccgaaggtaggagaaggtc

SEQ ID NO: 986 - RNA, 20 nt, synthetic construct
  source 1..20: mol_type = other RNA
cccgtccctggaactgccca

SEQ ID NO: 987 - RNA, 20 nt, synthetic construct
  source 1..20: mol_type = other RNA
ccctcagactcaccagattc

SEQ ID NO: 988 - RNA, 20 nt, synthetic construct
  source 1..20: mol_type = other RNA
ccctctgccacctcctcgag

SEQ ID NO: 989 - RNA, 20 nt, synthetic construct
  source 1..20: mol_type = other RNA
ccctggaactgcccaagcca

SEQ ID NO: 990 - RNA, 20 nt, synthetic construct
  source 1..20: mol_type = other RNA
ccctgtgggccccgtccctg

SEQ ID NO: 991 - RNA, 20 nt, synthetic construct
  source 1..20: mol_type = other RNA
cccttgcctgctggggcctt

SEQ ID NO: 992 - RNA, 20 nt, synthetic construct
  source 1..20: mol_type = other RNA
ccgaaggtaggagaaggtct

SEQ ID NO: 993 - RNA, 20 nt, synthetic construct
  source 1..20: mol_type = other RNA
ccgctccacagccagcaaag

SEQ ID NO: 994 - RNA, 20 nt, synthetic construct
  source 1..20: mol_type = other RNA
ccgctgcccagtccgctcca

SEQ ID NO: 995 - RNA, 20 nt, synthetic construct
  source 1..20: mol_type = other RNA
ccgtccctggaactgcccaa

SEQ ID NO: 996 - RNA, 20 nt, synthetic construct
  source 1..20: mol_type = other RNA
cctaccttcgggaatctggt

SEQ ID NO: 997 - RNA, 20 nt, synthetic construct
  source 1..20: mol_type = other RNA
cctcagactcaccagattcc

SEQ ID NO: 998 - RNA, 20 nt, synthetic construct
  source 1..20: mol_type = other RNA
cctcccccctcagactcacc

SEQ ID NO: 999 - RNA, 20 nt, synthetic construct
  source 1..20: mol_type = other RNA
cctcctcgaggaaggcccca

SEQ ID NO: 1000 - RNA, 20 nt, synthetic construct
  source 1..20: mol_type = other RNA
cctcctctgggtccagcacc

SEQ ID NO: 1001 - RNA, 20 nt, synthetic construct
  source 1..20: mol_type = other RNA
cctcgaggaaggccccagca

SEQ ID NO: 1002 - RNA, 20 nt, synthetic construct
  source 1..20: mol_type = other RNA
cctcgaggaggtggcagagg

SEQ ID NO: 1003 - RNA, 20 nt, synthetic construct
  source 1..20: mol_type = other RNA
cctcgtcctttgctggctgt

SEQ ID NO: 1004 - RNA, 20 nt, synthetic construct
  source 1..20: mol_type = other RNA
cctctgccacctcctcgagg

SEQ ID NO: 1005 - RNA, 20 nt, synthetic construct
  source 1..20: mol_type = other RNA
cctctgggtccagcaccttt

SEQ ID NO: 1006 - RNA, 20 nt, synthetic construct
  source 1..20: mol_type = other RNA
cctgcctcccccctcagact

SEQ ID NO: 1007 - RNA, 20 nt, synthetic construct
  source 1..20: mol_type = other RNA
cctgctggggccttcctcga

SEQ ID NO: 1008 - RNA, 20 nt, synthetic construct
  source 1..20: mol_type = other RNA
cctggaactgcccaagccag

SEQ ID NO: 1009 - RNA, 20 nt, synthetic construct
  source 1..20: mol_type = other RNA
cctgtgggccccgtccctgg

SEQ ID NO: 1010 - RNA, 20 nt, synthetic construct
  source 1..20: mol_type = other RNA
ccttcctcgaggaggtggca

SEQ ID NO: 1011 - RNA, 20 nt, synthetic construct
  source 1..20: mol_type = other RNA
ccttcgggaatctggtgagt

SEQ ID NO: 1012 - RNA, 20 nt, synthetic construct
  source 1..20: mol_type = other RNA
ccttctagacctcgtccttt

SEQ ID NO: 1013 - RNA, 20 nt, synthetic construct
  source 1..20: mol_type = other RNA
ccttctcctaccttcgggaa

SEQ ID NO: 1014 - RNA, 20 nt, synthetic construct
  source 1..20: mol_type = other RNA
ccttgcctgctggggccttc

SEQ ID NO: 1015 - RNA, 20 nt, synthetic construct
  source 1..20: mol_type = other RNA
cctttgctggctgtggagcg

SEQ ID NO: 1016 - RNA, 20 nt, synthetic construct
  source 1..20: mol_type = other RNA
cctttggctcactctctgtc

SEQ ID NO: 1017 - RNA, 20 nt, synthetic construct
  source 1..20: mol_type = other RNA
cgaaggtaggagaaggtctt

SEQ ID NO: 1018 - RNA, 20 nt, synthetic construct
  source 1..20: mol_type = other RNA
cgaggaaggccccagcaggc

SEQ ID NO: 1019 - RNA, 20 nt, synthetic construct
  source 1..20: mol_type = other RNA
cgaggaggtggcagagggta

SEQ ID NO: 1020 - RNA, 20 nt, synthetic construct
  source 1..20: mol_type = other RNA
cgaggtctagaaggcagtgg

SEQ ID NO: 1021 - RNA, 20 nt, synthetic construct
  source 1..20: mol_type = other RNA
cgctccacagccagcaaagg

SEQ ID NO: 1022 - RNA, 20 nt, synthetic construct
  source 1..20: mol_type = other RNA
cgctgcccagtccgctccac

SEQ ID NO: 1023 - RNA, 20 nt, synthetic construct
  source 1..20: mol_type = other RNA
cggactgggcagcggcccct

SEQ ID NO: 1024 - RNA, 20 nt, synthetic construct
  source 1..20: mol_type = other RNA
cgggaatctggtgagtctga

SEQ ID NO: 1025 - RNA, 20 nt, synthetic construct
  source 1..20: mol_type = other RNA
cgtccctggaactgcccaag

SEQ ID NO: 1026 - RNA, 20 nt, synthetic construct
  source 1..20: mol_type = other RNA
cgtcctttgctggctgtgga

SEQ ID NO: 1027 - RNA, 20 nt, synthetic construct
  source 1..20: mol_type = other RNA
ctaccttcgggaatctggtg

SEQ ID NO: 1028 - RNA, 20 nt, synthetic construct
  source 1..20: mol_type = other RNA
ctagaaggcagtggatgagc

SEQ ID NO: 1029 - RNA, 20 nt, synthetic construct
  source 1..20: mol_type = other RNA
ctagacctcgtcctttgctg

SEQ ID NO: 1030 - RNA, 20 nt, synthetic construct
  source 1..20: mol_type = other RNA
ctatgcacagcagatcctcc

SEQ ID NO: 1031 - RNA, 20 nt, synthetic construct
  source 1..20: mol_type = other RNA
ctcaccagattcccgaaggt

SEQ ID NO: 1032 - RNA, 20 nt, synthetic construct
  source 1..20: mol_type = other RNA
ctcactctctgtctgggctg

SEQ ID NO: 1033 - RNA, 20 nt, synthetic construct
  source 1..20: mol_type = other RNA
ctcactgctcatccactgcc

SEQ ID NO: 1034 - RNA, 20 nt, synthetic construct
  source 1..20: mol_type = other RNA
ctcagactcaccagattccc

SEQ ID NO: 1035 - RNA, 20 nt, synthetic construct
  source 1..20: mol_type = other RNA
ctcatccactgccttctaga

SEQ ID NO: 1036 - RNA, 20 nt, synthetic construct
  source 1..20: mol_type = other RNA
ctccacagccagcaaaggac

SEQ ID NO: 1037 - RNA, 20 nt, synthetic construct
  source 1..20: mol_type = other RNA
ctccactcactgctcatcca

SEQ ID NO: 1038 - RNA, 20 nt, synthetic construct
  source 1..20: mol_type = other RNA
ctcccccctcagactcacca

SEQ ID NO: 1039 - RNA, 20 nt, synthetic construct
  source 1..20: mol_type = other RNA
ctcctaccttcgggaatctg

SEQ ID NO: 1040 - RNA, 20 nt, synthetic construct
  source 1..20: mol_type = other RNA
ctcctcgaggaaggccccag

SEQ ID NO: 1041 - RNA, 20 nt, synthetic construct
  source 1..20: mol_type = other RNA
ctcctctgggtccagcacct

SEQ ID NO: 1042 - RNA, 20 nt, synthetic construct
  source 1..20: mol_type = other RNA
ctcgaggaaggccccagcag

SEQ ID NO: 1043 - RNA, 20 nt, synthetic construct
  source 1..20: mol_type = other RNA
ctcgaggaggtggcagaggg

SEQ ID NO: 1044 - RNA, 20 nt, synthetic construct
  source 1..20: mol_type = other RNA
ctcgtcctttgctggctgtg

SEQ ID NO: 1045 - RNA, 20 nt, synthetic construct
  source 1..20: mol_type = other RNA
ctctctgtctgggctggggt

SEQ ID NO: 1046 - RNA, 20 nt, synthetic construct
  source 1..20: mol_type = other RNA
ctctgccacctcctcgagga

SEQ ID NO: 1047 - RNA, 20 nt, synthetic construct
  source 1..20: mol_type = other RNA
ctctgggtccagcacctttg

SEQ ID NO: 1048 - RNA, 20 nt, synthetic construct
  source 1..20: mol_type = other RNA
ctctgtctgggctggggtac

SEQ ID NO: 1049 - RNA, 20 nt, synthetic construct
  source 1..20: mol_type = other RNA
ctgcatgactggcttgggca

SEQ ID NO: 1050 - RNA, 20 nt, synthetic construct
  source 1..20: mol_type = other RNA
ctgccacctcctcgaggaag

SEQ ID NO: 1051 - RNA, 20 nt, synthetic construct
  source 1..20: mol_type = other RNA
ctgcccaagccagtcatgca

SEQ ID NO: 1052 - RNA, 20 nt, synthetic construct
  source 1..20: mol_type = other RNA
ctgcccagtccgctccacag

SEQ ID NO: 1053 - RNA, 20 nt, synthetic construct
  source 1..20: mol_type = other RNA
ctgcctcccccctcagactc

SEQ ID NO: 1054 - RNA, 20 nt, synthetic construct
  source 1..20: mol_type = other RNA
ctgccttctagacctcgtcc

SEQ ID NO: 1055 - RNA, 20 nt, synthetic construct
  source 1..20: mol_type = other RNA
ctgctcatccactgccttct

SEQ ID NO: 1056 - RNA, 20 nt, synthetic construct
  source 1..20: mol_type = other RNA
ctgctggggccttcctcgag

SEQ ID NO: 1057 - RNA, 20 nt, synthetic construct
  source 1..20: mol_type = other RNA
ctgctgtgcatagccaagac

SEQ ID NO: 1058 - RNA, 20 nt, synthetic construct
  source 1..20: mol_type = other RNA
ctggaactgcccaagccagt

SEQ ID NO: 1059 - RNA, 20 nt, synthetic construct
  source 1..20: mol_type = other RNA
ctggacccagaggaggatct

SEQ ID NO: 1060 - RNA, 20 nt, synthetic construct
  source 1..20: mol_type = other RNA
ctggctgtggagcggactgg

SEQ ID NO: 1061 - RNA, 20 nt, synthetic construct
  source 1..20: mol_type = other RNA
ctggcttgggcagttccagg

SEQ ID NO: 1062 - RNA, 20 nt, synthetic construct
  source 1..20: mol_type = other RNA
ctgggcagcggcccctgtgg

SEQ ID NO: 1063 - RNA, 20 nt, synthetic construct
  source 1..20: mol_type = other RNA
ctgggctggggtaccctctg

SEQ ID NO: 1064 - RNA, 20 nt, synthetic construct
  source 1..20: mol_type = other RNA
ctggggccttcctcgaggag

SEQ ID NO: 1065 - RNA, 20 nt, synthetic construct
  source 1..20: mol_type = other RNA
ctggggtaccctctgccacc

SEQ ID NO: 1066 - RNA, 20 nt, synthetic construct
  source 1..20: mol_type = other RNA
ctgggtccagcacctttggc

SEQ ID NO: 1067 - RNA, 20 nt, synthetic construct
  source 1..20: mol_type = other RNA
ctggtgagtctgagggggga

SEQ ID NO: 1068 - RNA, 20 nt, synthetic construct
  source 1..20: mol_type = other RNA
ctgtctgggctggggtaccc

SEQ ID NO: 1069 - RNA, 20 nt, synthetic construct
  source 1..20: mol_type = other RNA
ctgtgcatagccaagacctt

SEQ ID NO: 1070 - RNA, 20 nt, synthetic construct
  source 1..20: mol_type = other RNA
ctgtggagcggactgggcag

SEQ ID NO: 1071 - RNA, 20 nt, synthetic construct
  source 1..20: mol_type = other RNA
ctgtgggccccgtccctgga

SEQ ID NO: 1072 - RNA, 20 nt, synthetic construct
  source 1..20: mol_type = other RNA
cttcctcgaggaggtggcag

SEQ ID NO: 1073 - RNA, 20 nt, synthetic construct
  source 1..20: mol_type = other RNA
cttcgggaatctggtgagtc

SEQ ID NO: 1074 - RNA, 20 nt, synthetic construct
  source 1..20: mol_type = other RNA
cttctagacctcgtcctttg

SEQ ID NO: 1075 - RNA, 20 nt, synthetic construct
  source 1..20: mol_type = other RNA
cttctcctaccttcgggaat

SEQ ID NO: 1076 - RNA, 20 nt, synthetic construct
  source 1..20: mol_type = other RNA
cttgcctgctggggccttcc

SEQ ID NO: 1077 - RNA, 20 nt, synthetic construct
  source 1..20: mol_type = other RNA
cttggctatgcacagcagat

SEQ ID NO: 1078 - RNA, 20 nt, synthetic construct
  source 1..20: mol_type = other RNA
cttgggcagttccagggacg

SEQ ID NO: 1079 - RNA, 20 nt, synthetic construct
  source 1..20: mol_type = other RNA
ctttgctggctgtggagcgg

SEQ ID NO: 1080 - RNA, 20 nt, synthetic construct
  source 1..20: mol_type = other RNA
ctttggctcactctctgtct

SEQ ID NO: 1081 - RNA, 20 nt, synthetic construct
  source 1..20: mol_type = other RNA
gaaaaggcctgcctcccccc

SEQ ID NO: 1082 - RNA, 20 nt, synthetic construct
  source 1..20: mol_type = other RNA
gaactgcccaagccagtcat

SEQ ID NO: 1083 - RNA, 20 nt, synthetic construct
  source 1..20: mol_type = other RNA
gaaggcagtggatgagcagt

SEQ ID NO: 1084 - RNA, 20 nt, synthetic construct
  source 1..20: mol_type = other RNA
gaaggccccagcaggcaagg

SEQ ID NO: 1085 - RNA, 20 nt, synthetic construct
  source 1..20: mol_type = other RNA
gaaggtaggagaaggtcttg

SEQ ID NO: 1086 - RNA, 20 nt, synthetic construct
  source 1..20: mol_type = other RNA
gaaggtcttggctatgcaca

SEQ ID NO: 1087 - RNA, 20 nt, synthetic construct
  source 1..20: mol_type = other RNA
gaatctggtgagtctgaggg

SEQ ID NO: 1088 - RNA, 20 nt, synthetic construct
  source 1..20: mol_type = other RNA
gacagagagtgagccaaagg

SEQ ID NO: 1089 - RNA, 20 nt, synthetic construct
  source 1..20: mol_type = other RNA
gacccagaggaggatctgct

SEQ ID NO: 1090 - RNA, 20 nt, synthetic construct
  source 1..20: mol_type = other RNA
gacctcgtcctttgctggct

SEQ ID NO: 1091 - RNA, 20 nt, synthetic construct
  source 1..20: mol_type = other RNA
gaccttctcctaccttcggg

SEQ ID NO: 1092 - RNA, 20 nt, synthetic construct
  source 1..20: mol_type = other RNA
gacgaggtctagaaggcagt

SEQ ID NO: 1093 - RNA, 20 nt, synthetic construct
  source 1..20: mol_type = other RNA
gactcaccagattcccgaag

SEQ ID NO: 1094 - RNA, 20 nt, synthetic construct
  source 1..20: mol_type = other RNA
gactggcttgggcagttcca

SEQ ID NO: 1095 - RNA, 20 nt, synthetic construct
  source 1..20: mol_type = other RNA
gactgggcagcggcccctgt

SEQ ID NO: 1096 - RNA, 20 nt, synthetic construct
  source 1..20: mol_type = other RNA
gagaaggtcttggctatgca

SEQ ID NO: 1097 - RNA, 20 nt, synthetic construct
  source 1..20: mol_type = other RNA
gagagtgagccaaaggtgct

SEQ ID NO: 1098 - RNA, 20 nt, synthetic construct
  source 1..20: mol_type = other RNA
gagccaaaggtgctggaccc

SEQ ID NO: 1099 - RNA, 20 nt, synthetic construct
  source 1..20: mol_type = other RNA
gagcggactgggcagcggcc

SEQ ID NO: 1100 - RNA, 20 nt, synthetic construct
  source 1..20: mol_type = other RNA
gaggaaggccccagcaggca

SEQ ID NO: 1101 - RNA, 20 nt, synthetic construct
  source 1..20: mol_type = other RNA
gaggaggatctgctgtgcat

SEQ ID NO: 1102 - RNA, 20 nt, synthetic construct
  source 1..20: mol_type = other RNA
gaggaggtggcagagggtac

SEQ ID NO: 1103 - RNA, 20 nt, synthetic construct
  source 1..20: mol_type = other RNA
gaggatctgctgtgcatagc

SEQ ID NO: 1104 - RNA, 20 nt, synthetic construct
  source 1..20: mol_type = other RNA
gagggtaccccagcccagac

SEQ ID NO: 1105 - RNA, 20 nt, synthetic construct
  source 1..20: mol_type = other RNA
gaggtctagaaggcagtgga

SEQ ID NO: 1106 - RNA, 20 nt, synthetic construct
  source 1..20: mol_type = other RNA
gaggtggcagagggtacccc

SEQ ID NO: 1107 - RNA, 20 nt, synthetic construct
  source 1..20: mol_type = other RNA
gagtctgaggggggaggcag

SEQ ID NO: 1108 - RNA, 20 nt, synthetic construct
  source 1..20: mol_type = other RNA
gagtgagccaaaggtgctgg

SEQ ID NO: 1109 - RNA, 20 nt, synthetic construct
  source 1..20: mol_type = other RNA
gatcctcctctgggtccagc

SEQ ID NO: 1110 - RNA, 20 nt, synthetic construct
  source 1..20: mol_type = other RNA
gatctgctgtgcatagccaa

SEQ ID NO: 1111 - RNA, 20 nt, synthetic construct
  source 1..20: mol_type = other RNA
gattcccgaaggtaggagaa

SEQ ID NO: 1112 - RNA, 20 nt, synthetic construct
  source 1..20: mol_type = other RNA
gcaaaggacgaggtctagaa

SEQ ID NO: 1113 - RNA, 20 nt, synthetic construct
  source 1..20: mol_type = other RNA
gcaagggctgcatgactggc

SEQ ID NO: 1114 - RNA, 20 nt, synthetic construct
  source 1..20: mol_type = other RNA
gcacagcagatcctcctctg

SEQ ID NO: 1115 - RNA, 20 nt, synthetic construct
  source 1..20: mol_type = other RNA
gcacctttggctcactctct

SEQ ID NO: 1116 - RNA, 20 nt, synthetic construct
  source 1..20: mol_type = other RNA
gcagagggtaccccagccca

SEQ ID NO: 1117 - RNA, 20 nt, synthetic construct
  source 1..20: mol_type = other RNA
gcagatcctcctctgggtcc

SEQ ID NO: 1118 - RNA, 20 nt, synthetic construct
  source 1..20: mol_type = other RNA
gcagcccttgcctgctgggg

SEQ ID NO: 1119 - RNA, 20 nt, synthetic construct
  source 1..20: mol_type = other RNA
gcaggcaagggctgcatgac

SEQ ID NO: 1120 - RNA, 20 nt, synthetic construct
  source 1..20: mol_type = other RNA
gcagttccagggacggggcc

SEQ ID NO: 1121 - RNA, 20 nt, synthetic construct
  source 1..20: mol_type = other RNA
gcatagccaagaccttctcc

SEQ ID NO: 1122 - RNA, 20 nt, synthetic construct
  source 1..20: mol_type = other RNA
gcatgactggcttgggcagt

SEQ ID NO: 1123 - RNA, 20 nt, synthetic construct
  source 1..20: mol_type = other RNA
gccaaaggtgctggacccag

SEQ ID NO: 1124 - RNA, 20 nt, synthetic construct
  source 1..20: mol_type = other RNA
gccaagaccttctcctacct

SEQ ID NO: 1125 - RNA, 20 nt, synthetic construct
  source 1..20: mol_type = other RNA
gccacctcctcgaggaaggc

SEQ ID NO: 1126 - RNA, 20 nt, synthetic construct
  source 1..20: mol_type = other RNA
gccagcaaaggacgaggtct

SEQ ID NO: 1127 - RNA, 20 nt, synthetic construct
  source 1..20: mol_type = other RNA
gccagtcatgcagcccttgc

SEQ ID NO: 1128 - RNA, 20 nt, synthetic construct
  source 1..20: mol_type = other RNA
gcccaagccagtcatgcagc

SEQ ID NO: 1129 - RNA, 20 nt, synthetic construct
  source 1..20: mol_type = other RNA
gcccagacagagagtgagcc

SEQ ID NO: 1130 - RNA, 20 nt, synthetic construct
  source 1..20: mol_type = other RNA
gcccagtccgctccacagcc

SEQ ID NO: 1131 - RNA, 20 nt, synthetic construct
  source 1..20: mol_type = other RNA
gccccagcaggcaagggctg

SEQ ID NO: 1132 - RNA, 20 nt, synthetic construct
  source 1..20: mol_type = other RNA
gccccgtccctggaactgcc

SEQ ID NO: 1133 - RNA, 20 nt, synthetic construct
  source 1..20: mol_type = other RNA
gcccttgcctgctggggcct

SEQ ID NO: 1134 - RNA, 20 nt, synthetic construct
  source 1..20: mol_type = other RNA
gccgctgcccagtccgctcc

SEQ ID NO: 1135 - RNA, 20 nt, synthetic construct
  source 1..20: mol_type = other RNA
gcctcccccctcagactcac

SEQ ID NO: 1136 - RNA, 20 nt, synthetic construct
  source 1..20: mol_type = other RNA
gcctgcctcccccctcagac

SEQ ID NO: 1137 - RNA, 20 nt, synthetic construct
  source 1..20: mol_type = other RNA
gcctgctggggccttcctcg

SEQ ID NO: 1138 - RNA, 20 nt, synthetic construct
  source 1..20: mol_type = other RNA
gccttcctcgaggaggtggc

SEQ ID NO: 1139 - RNA, 20 nt, synthetic construct
  source 1..20: mol_type = other RNA
gccttctagacctcgtcctt

SEQ ID NO: 1140 - RNA, 20 nt, synthetic construct
  source 1..20: mol_type = other RNA
gctatgcacagcagatcctc

SEQ ID NO: 1141 - RNA, 20 nt, synthetic construct
  source 1..20: mol_type = other RNA
gctcactctctgtctgggct

SEQ ID NO: 1142 - RNA, 20 nt, synthetic construct
  source 1..20: mol_type = other RNA
gctcatccactgccttctag

SEQ ID NO: 1143 - RNA, 20 nt, synthetic construct
  source 1..20: mol_type = other RNA
gctccacagccagcaaagga

SEQ ID NO: 1144 - RNA, 20 nt, synthetic construct
  source 1..20: mol_type = other RNA
gctgcatgactggcttgggc

SEQ ID NO: 1145 - RNA, 20 nt, synthetic construct
  source 1..20: mol_type = other RNA
gctgcccagtccgctccaca

SEQ ID NO: 1146 - RNA, 20 nt, synthetic construct
  source 1..20: mol_type = other RNA
gctggacccagaggaggatc

SEQ ID NO: 1147 - RNA, 20 nt, synthetic construct
  source 1..20: mol_type = other RNA
gctggctgtggagcggactg

SEQ ID NO: 1148 - RNA, 20 nt, synthetic construct
  source 1..20: mol_type = other RNA
gctggggccttcctcgagga

SEQ ID NO: 1149 - RNA, 20 nt, synthetic construct
  source 1..20: mol_type = other RNA
gctggggtaccctctgccac

SEQ ID NO: 1150 - RNA, 20 nt, synthetic construct
  source 1..20: mol_type = other RNA
gctgtgcatagccaagacct

SEQ ID NO: 1151 - RNA, 20 nt, synthetic construct
  source 1..20: mol_type = other RNA
gctgtggagcggactgggca

SEQ ID NO: 1152 - RNA, 20 nt, synthetic construct
  source 1..20: mol_type = other RNA
gcttgggcagttccagggac

SEQ ID NO: 1153 - RNA, 20 nt, synthetic construct
  source 1..20: mol_type = other RNA
ggaaaaggcctgcctccccc

SEQ ID NO: 1154 - RNA, 20 nt, synthetic construct
  source 1..20: mol_type = other RNA
ggaactgcccaagccagtca

SEQ ID NO: 1155 - RNA, 20 nt, synthetic construct
  source 1..20: mol_type = other RNA
ggaaggccccagcaggcaag

SEQ ID NO: 1156 - RNA, 20 nt, synthetic construct
  source 1..20: mol_type = other RNA
ggaatctggtgagtctgagg

SEQ ID NO: 1157 - RNA, 20 nt, synthetic construct
  source 1..20: mol_type = other RNA
ggacccagaggaggatctgc

SEQ ID NO: 1158 - RNA, 20 nt, synthetic construct
  source 1..20: mol_type = other RNA
ggacgaggtctagaaggcag

SEQ ID NO: 1159 - RNA, 20 nt, synthetic construct
  source 1..20: mol_type = other RNA
ggactgggcagcggcccctg

SEQ ID NO: 1160 - RNA, 20 nt, synthetic construct
  source 1..20: mol_type = other RNA
ggagaaggtcttggctatgc

SEQ ID NO: 1161 - RNA, 20 nt, synthetic construct
  source 1..20: mol_type = other RNA
ggagcggactgggcagcggc

SEQ ID NO: 1162 - RNA, 20 nt, synthetic construct
  source 1..20: mol_type = other RNA
ggaggatctgctgtgcatag

SEQ ID NO: 1163 - RNA, 20 nt, synthetic construct
  source 1..20: mol_type = other RNA
ggaggtggcagagggtaccc

SEQ ID NO: 1164 - RNA, 20 nt, synthetic construct
  source 1..20: mol_type = other RNA
ggatctgctgtgcatagcca

SEQ ID NO: 1165 - RNA, 20 nt, synthetic construct
  source 1..20: mol_type = other RNA
ggcaagggctgcatgactgg

SEQ ID NO: 1166 - RNA, 20 nt, synthetic construct
  source 1..20: mol_type = other RNA
ggcagagggtaccccagccc

SEQ ID NO: 1167 - RNA, 20 nt, synthetic construct
  source 1..20: mol_type = other RNA
ggcagttccagggacggggc

SEQ ID NO: 1168 - RNA, 20 nt, synthetic construct
  source 1..20: mol_type = other RNA
ggccccagcaggcaagggct

SEQ ID NO: 1169 - RNA, 20 nt, synthetic construct
  source 1..20: mol_type = other RNA
ggccccgtccctggaactgc

SEQ ID NO: 1170 - RNA, 20 nt, synthetic construct
  source 1..20: mol_type = other RNA
ggccgctgcccagtccgctc

SEQ ID NO: 1171 - RNA, 20 nt, synthetic construct
  source 1..20: mol_type = other RNA
ggcctgcctcccccctcaga

SEQ ID NO: 1172 - RNA, 20 nt, synthetic construct
  source 1..20: mol_type = other RNA
ggccttcctcgaggaggtgg

SEQ ID NO: 1173 - RNA, 20 nt, synthetic construct
  source 1..20: mol_type = other RNA
ggctatgcacagcagatcct

SEQ ID NO: 1174 - RNA, 20 nt, synthetic construct
  source 1..20: mol_type = other RNA
ggctcactctctgtctgggc

SEQ ID NO: 1175 - RNA, 20 nt, synthetic construct
  source 1..20: mol_type = other RNA
ggctgcatgactggcttggg

SEQ ID NO: 1176 - RNA, 20 nt, synthetic construct
  source 1..20: mol_type = other RNA
ggctggggtaccctctgcca

SEQ ID NO: 1177 - RNA, 20 nt, synthetic construct
  source 1..20: mol_type = other RNA
ggctgtggagcggactgggc

SEQ ID NO: 1178 - RNA, 20 nt, synthetic construct
  source 1..20: mol_type = other RNA
ggcttgggcagttccaggga

SEQ ID NO: 1179 - RNA, 20 nt, synthetic construct
  source 1..20: mol_type = other RNA
gggaatctggtgagtctgag

SEQ ID NO: 1180 - RNA, 20 nt, synthetic construct
  source 1..20: mol_type = other RNA
gggcagttccagggacgggg

SEQ ID NO: 1181 - RNA, 20 nt, synthetic construct
  source 1..20: mol_type = other RNA
gggccccgtccctggaactg

SEQ ID NO: 1182 - RNA, 20 nt, synthetic construct
  source 1..20: mol_type = other RNA
gggccgctgcccagtccgct

SEQ ID NO: 1183 - RNA, 20 nt, synthetic construct
  source 1..20: mol_type = other RNA
gggccttcctcgaggaggtg

SEQ ID NO: 1184 - RNA, 20 nt, synthetic construct
  source 1..20: mol_type = other RNA
gggctgcatgactggcttgg

SEQ ID NO: 1185 - RNA, 20 nt, synthetic construct
  source 1..20: mol_type = other RNA
gggctggggtaccctctgcc

SEQ ID NO: 1186 - RNA, 20 nt, synthetic construct
  source 1..20: mol_type = other RNA
ggggccttcctcgaggaggt

SEQ ID NO: 1187 - RNA, 20 nt, synthetic construct
  source 1..20: mol_type = other RNA
ggggtaccctctgccacctc

SEQ ID NO: 1188 - RNA, 20 nt, synthetic construct
  source 1..20: mol_type = other RNA
gggtaccccagcccagacag

SEQ ID NO: 1189 - RNA, 20 nt, synthetic construct
  source 1..20: mol_type = other RNA
gggtaccctctgccacctcc

SEQ ID NO: 1190 - RNA, 20 nt, synthetic construct
  source 1..20: mol_type = other RNA
gggtccagcacctttggctc

SEQ ID NO: 1191 - RNA, 20 nt, synthetic construct
  source 1..20: mol_type = other RNA
ggtaccccagcccagacaga

SEQ ID NO: 1192 - RNA, 20 nt, synthetic construct
  source 1..20: mol_type = other RNA
ggtaccctctgccacctcct

SEQ ID NO: 1193 - RNA, 20 nt, synthetic construct
  source 1..20: mol_type = other RNA
ggtaggagaaggtcttggct

SEQ ID NO: 1194 - RNA, 20 nt, synthetic construct
  source 1..20: mol_type = other RNA
ggtccagcacctttggctca

SEQ ID NO: 1195 - RNA, 20 nt, synthetic construct
  source 1..20: mol_type = other RNA
ggtctagaaggcagtggatg

SEQ ID NO: 1196 - RNA, 20 nt, synthetic construct
  source 1..20: mol_type = other RNA
ggtcttggctatgcacagca

SEQ ID NO: 1197 - RNA, 20 nt, synthetic construct
  source 1..20: mol_type = other RNA
ggtgagtctgaggggggagg

SEQ ID NO: 1198 - RNA, 20 nt, synthetic construct
  source 1..20: mol_type = other RNA
ggtgctggacccagaggagg

SEQ ID NO: 1199 - RNA, 20 nt, synthetic construct
  source 1..20: mol_type = other RNA
ggtggcagagggtaccccag

SEQ ID NO: 1200 - RNA, 20 nt, synthetic construct
  source 1..20: mol_type = other RNA
gtaccccagcccagacagag

SEQ ID NO: 1201 - RNA, 20 nt, synthetic construct
  source 1..20: mol_type = other RNA
gtaccctctgccacctcctc

SEQ ID NO: 1202 - RNA, 20 nt, synthetic construct
  source 1..20: mol_type = other RNA
gtaggagaaggtcttggcta

SEQ ID NO: 1203 - RNA, 20 nt, synthetic construct
  source 1..20: mol_type = other RNA
gtcatgcagcccttgcctgc

SEQ ID NO: 1204 - RNA, 20 nt, synthetic construct
  source 1..20: mol_type = other RNA
gtccagcacctttggctcac

SEQ ID NO: 1205 - RNA, 20 nt, synthetic construct
  source 1..20: mol_type = other RNA
gtccctggaactgcccaagc

SEQ ID NO: 1206 - RNA, 20 nt, synthetic construct
  source 1..20: mol_type = other RNA
gtccgctccacagccagcaa

SEQ ID NO: 1207 - RNA, 20 nt, synthetic construct
  source 1..20: mol_type = other RNA
gtcctttgctggctgtggag

SEQ ID NO: 1208 - RNA, 20 nt, synthetic construct
  source 1..20: mol_type = other RNA
gtctagaaggcagtggatga

SEQ ID NO: 1209 - RNA, 20 nt, synthetic construct
  source 1..20: mol_type = other RNA
gtctgaggggggaggcaggc

SEQ ID NO: 1210 - RNA, 20 nt, synthetic construct
  source 1..20: mol_type = other RNA
gtctgggctggggtaccctc

SEQ ID NO: 1211 - RNA, 20 nt, synthetic construct
  source 1..20: mol_type = other RNA
gtcttggctatgcacagcag

SEQ ID NO: 1212 - RNA, 20 nt, synthetic construct
  source 1..20: mol_type = other RNA
gtgagccaaaggtgctggac

SEQ ID NO: 1213 - RNA, 20 nt, synthetic construct
  source 1..20: mol_type = other RNA
gtgagtctgaggggggaggc

SEQ ID NO: 1214 - RNA, 20 nt, synthetic construct
  source 1..20: mol_type = other RNA
gtgcatagccaagaccttct

SEQ ID NO: 1215 - RNA, 20 nt, synthetic construct
  source 1..20: mol_type = other RNA
gtgctggacccagaggagga

SEQ ID NO: 1216 - RNA, 20 nt, synthetic construct
  source 1..20: mol_type = other RNA
gtggagcggactgggcagcg

SEQ ID NO: 1217 - RNA, 20 nt, synthetic construct
  source 1..20: mol_type = other RNA
gtggcagagggtaccccagc

SEQ ID NO: 1218 - RNA, 20 nt, synthetic construct
  source 1..20: mol_type = other RNA
gtgggccccgtccctggaac

SEQ ID NO: 1219 - RNA, 20 nt, synthetic construct
  source 1..20: mol_type = other RNA
gttccagggacggggcccac

SEQ ID NO: 1220 - RNA, 20 nt, synthetic construct
  source 1..20: mol_type = other RNA
taccccagcccagacagaga

SEQ ID NO: 1221 - RNA, 20 nt, synthetic construct
  source 1..20: mol_type = other RNA
taccctctgccacctcctcg

SEQ ID NO: 1222 - RNA, 20 nt, synthetic construct
  source 1..20: mol_type = other RNA
taccttcgggaatctggtga

SEQ ID NO: 1223 - RNA, 20 nt, synthetic construct
  source 1..20: mol_type = other RNA
tagaaggcagtggatgagca

SEQ ID NO: 1224 - RNA, 20 nt, synthetic construct
  source 1..20: mol_type = other RNA
tagacctcgtcctttgctgg

SEQ ID NO: 1225 - RNA, 20 nt, synthetic construct
  source 1..20: mol_type = other RNA
tagccaagaccttctcctac

SEQ ID NO: 1226 - RNA, 20 nt, synthetic construct
  source 1..20: mol_type = other RNA
taggagaaggtcttggctat

SEQ ID NO: 1227 - RNA, 20 nt, synthetic construct
  source 1..20: mol_type = other RNA
tatgcacagcagatcctcct

SEQ ID NO: 1228 - RNA, 20 nt, synthetic construct
  source 1..20: mol_type = other RNA
tcaccagattcccgaaggta

SEQ ID NO: 1229 - RNA, 20 nt, synthetic construct
  source 1..20: mol_type = other RNA
tcactctctgtctgggctgg

SEQ ID NO: 1230 - RNA, 20 nt, synthetic construct
  source 1..20: mol_type = other RNA
tcactgctcatccactgcct

SEQ ID NO: 1231 - RNA, 20 nt, synthetic construct
  source 1..20: mol_type = other RNA
tcagactcaccagattcccg

SEQ ID NO: 1232 - RNA, 20 nt, synthetic construct
  source 1..20: mol_type = other RNA
tcatccactgccttctagac

SEQ ID NO: 1233 - RNA, 20 nt, synthetic construct
  source 1..20: mol_type = other RNA
tcatgcagcccttgcctgct

SEQ ID NO: 1234 - RNA, 20 nt, synthetic construct
  source 1..20: mol_type = other RNA
tccacagccagcaaaggacg

SEQ ID NO: 1235 - RNA, 20 nt, synthetic construct
  source 1..20: mol_type = other RNA
tccactcactgctcatccac

SEQ ID NO: 1236 - RNA, 20 nt, synthetic construct
  source 1..20: mol_type = other RNA
tccactgccttctagacctc

SEQ ID NO: 1237 - RNA, 20 nt, synthetic construct
  source 1..20: mol_type = other RNA
tccagcacctttggctcact

SEQ ID NO: 1238 - RNA, 20 nt, synthetic construct
  source 1..20: mol_type = other RNA
tccagggacggggcccacag

SEQ ID NO: 1239 - RNA, 20 nt, synthetic construct
  source 1..20: mol_type = other RNA
tcccccctcagactcaccag

SEQ ID NO: 1240 - RNA, 20 nt, synthetic construct
  source 1..20: mol_type = other RNA
tcccgaaggtaggagaaggt

SEQ ID NO: 1241 - RNA, 20 nt, synthetic construct
  source 1..20: mol_type = other RNA
tccctggaactgcccaagcc

SEQ ID NO: 1242 - RNA, 20 nt, synthetic construct
  source 1..20: mol_type = other RNA
tccgctccacagccagcaaa

SEQ ID NO: 1243 - RNA, 20 nt, synthetic construct
  source 1..20: mol_type = other RNA
tcctaccttcgggaatctgg

SEQ ID NO: 1244 - RNA, 20 nt, synthetic construct
  source 1..20: mol_type = other RNA
tcctcctctgggtccagcac

SEQ ID NO: 1245 - RNA, 20 nt, synthetic construct
  source 1..20: mol_type = other RNA
tcctcgaggaaggccccagc

SEQ ID NO: 1246 - RNA, 20 nt, synthetic construct
  source 1..20: mol_type = other RNA
tcctcgaggaggtggcagag

SEQ ID NO: 1247 - RNA, 20 nt, synthetic construct
  source 1..20: mol_type = other RNA
tcctctgggtccagcacctt

SEQ ID NO: 1248 - RNA, 20 nt, synthetic construct
  source 1..20: mol_type = other RNA
tcctttgctggctgtggagc

SEQ ID NO: 1249 - RNA, 20 nt, synthetic construct
  source 1..20: mol_type = other RNA
tcgaggaaggccccagcagg

SEQ ID NO: 1250 - RNA, 20 nt, synthetic construct
  source 1..20: mol_type = other RNA
tcgaggaggtggcagagggt

SEQ ID NO: 1251 - RNA, 20 nt, synthetic construct
  source 1..20: mol_type = other RNA
tcgggaatctggtgagtctg

SEQ ID NO: 1252 - RNA, 20 nt, synthetic construct
  source 1..20: mol_type = other RNA
tcgtcctttgctggctgtgg

SEQ ID NO: 1253 - RNA, 20 nt, synthetic construct
  source 1..20: mol_type = other RNA
tctagaaggcagtggatgag

SEQ ID NO: 1254 - RNA, 20 nt, synthetic construct
  source 1..20: mol_type = other RNA
tctagacctcgtcctttgct

SEQ ID NO: 1255 - RNA, 20 nt, synthetic construct
  source 1..20: mol_type = other RNA
tctcctaccttcgggaatct

SEQ ID NO: 1256 - RNA, 20 nt, synthetic construct
  source 1..20: mol_type = other RNA
tctctgtctgggctggggta

SEQ ID NO: 1257 - RNA, 20 nt, synthetic construct
  source 1..20: mol_type = other RNA
tctgccacctcctcgaggaa

SEQ ID NO: 1258 - RNA, 20 nt, synthetic construct
  source 1..20: mol_type = other RNA
tctgctgtgcatagccaaga

SEQ ID NO: 1259 - RNA, 20 nt, synthetic construct
  source 1..20: mol_type = other RNA
tctgggctggggtaccctct

SEQ ID NO: 1260 - RNA, 20 nt, synthetic construct
  source 1..20: mol_type = other RNA
tctgggtccagcacctttgg

SEQ ID NO: 1261 - RNA, 20 nt, synthetic construct
  source 1..20: mol_type = other RNA
tctggtgagtctgagggggg

SEQ ID NO: 1262 - RNA, 20 nt, synthetic construct
  source 1..20: mol_type = other RNA
tctgtctgggctggggtacc

SEQ ID NO: 1263 - RNA, 20 nt, synthetic construct
  source 1..20: mol_type = other RNA
tcttggctatgcacagcaga

SEQ ID NO: 1264 - RNA, 20 nt, synthetic construct
  source 1..20: mol_type = other RNA
tgactggcttgggcagttcc

SEQ ID NO: 1265 - RNA, 20 nt, synthetic construct
  source 1..20: mol_type = other RNA
tgagccaaaggtgctggacc

SEQ ID NO: 1266 - RNA, 20 nt, synthetic construct
  source 1..20: mol_type = other RNA
tgagtctgaggggggaggca

SEQ ID NO: 1267 - RNA, 20 nt, synthetic construct
  source 1..20: mol_type = other RNA
tgcacagcagatcctcctct

SEQ ID NO: 1268 - RNA, 20 nt, synthetic construct
  source 1..20: mol_type = other RNA
tgcagcccttgcctgctggg

SEQ ID NO: 1269 - RNA, 20 nt, synthetic construct
  source 1..20: mol_type = other RNA
tgcatagccaagaccttctc

SEQ ID NO: 1270 - RNA, 20 nt, synthetic construct
  source 1..20: mol_type = other RNA
tgcatgactggcttgggcag

SEQ ID NO: 1271 - RNA, 20 nt, synthetic construct
  source 1..20: mol_type = other RNA
tgccacctcctcgaggaagg

SEQ ID NO: 1272 - RNA, 20 nt, synthetic construct
  source 1..20: mol_type = other RNA
tgcccaagccagtcatgcag

SEQ ID NO: 1273 - RNA, 20 nt, synthetic construct
  source 1..20: mol_type = other RNA
tgcccagtccgctccacagc

SEQ ID NO: 1274 - RNA, 20 nt, synthetic construct
  source 1..20: mol_type = other RNA
tgcctcccccctcagactca

SEQ ID NO: 1275 - RNA, 20 nt, synthetic construct
  source 1..20: mol_type = other RNA
tgcctgctggggccttcctc

SEQ ID NO: 1276 - RNA, 20 nt, synthetic construct
  source 1..20: mol_type = other RNA
tgccttctagacctcgtcct

SEQ ID NO: 1277 - RNA, 20 nt, synthetic construct
  source 1..20: mol_type = other RNA
tgctcatccactgccttcta

SEQ ID NO: 1278 - RNA, 20 nt, synthetic construct
  source 1..20: mol_type = other RNA
tgctggacccagaggaggat

SEQ ID NO: 1279 - RNA, 20 nt, synthetic construct
  source 1..20: mol_type = other RNA
tgctggctgtggagcggact

SEQ ID NO: 1280 - RNA, 20 nt, synthetic construct
  source 1..20: mol_type = other RNA
tgctggggccttcctcgagg

SEQ ID NO: 1281 - RNA, 20 nt, synthetic construct
  source 1..20: mol_type = other RNA
tgctgtgcatagccaagacc

SEQ ID NO: 1282 - RNA, 20 nt, synthetic construct
  source 1..20: mol_type = other RNA
tggaactgcccaagccagtc

SEQ ID NO: 1283 - RNA, 20 nt, synthetic construct
  source 1..20: mol_type = other RNA
tggacccagaggaggatctg

SEQ ID NO: 1284 - RNA, 20 nt, synthetic construct
  source 1..20: mol_type = other RNA
tggagcggactgggcagcgg

SEQ ID NO: 1285 - RNA, 20 nt, synthetic construct
  source 1..20: mol_type = other RNA
tggcagagggtaccccagcc

SEQ ID NO: 1286 - RNA, 20 nt, synthetic construct
  source 1..20: mol_type = other RNA
tggctatgcacagcagatcc

SEQ ID NO: 1287 - RNA, 20 nt, synthetic construct
  source 1..20: mol_type = other RNA
tggctcactctctgtctggg

SEQ ID NO: 1288 - RNA, 20 nt, synthetic construct
  source 1..20: mol_type = other RNA
tggctgtggagcggactggg

SEQ ID NO: 1289 - RNA, 20 nt, synthetic construct
  source 1..20: mol_type = other RNA
tggcttgggcagttccaggg

SEQ ID NO: 1290 - RNA, 20 nt, synthetic construct
  source 1..20: mol_type = other RNA
tgggcagcggcccctgtggg

SEQ ID NO: 1291 - RNA, 20 nt, synthetic construct
  source 1..20: mol_type = other RNA
tgggcagttccagggacggg

SEQ ID NO: 1292 - RNA, 20 nt, synthetic construct
  source 1..20: mol_type = other RNA
tgggccccgtccctggaact

SEQ ID NO: 1293 - RNA, 20 nt, synthetic construct
  source 1..20: mol_type = other RNA
tgggctggggtaccctctgc

SEQ ID NO: 1294 - RNA, 20 nt, synthetic construct
  source 1..20: mol_type = other RNA
tggggccttcctcgaggagg

SEQ ID NO: 1295 - RNA, 20 nt, synthetic construct
  source 1..20: mol_type = other RNA
tggggtaccctctgccacct

SEQ ID NO: 1296 - RNA, 20 nt, synthetic construct
  source 1..20: mol_type = other RNA
tgggtccagcacctttggct

SEQ ID NO: 1297 - RNA, 20 nt, synthetic construct
  source 1..20: mol_type = other RNA
tggtgagtctgaggggggag

SEQ ID NO: 1298 - RNA, 20 nt, synthetic construct
  source 1..20: mol_type = other RNA
tgtctgggctggggtaccct

SEQ ID NO: 1299 - RNA, 20 nt, synthetic construct
  source 1..20: mol_type = other RNA
tgtgcatagccaagaccttc

SEQ ID NO: 1300 - RNA, 20 nt, synthetic construct
  source 1..20: mol_type = other RNA
tgtggagcggactgggcagc

SEQ ID NO: 1301 - RNA, 20 nt, synthetic construct
  source 1..20: mol_type = other RNA
tgtgggccccgtccctggaa

SEQ ID NO: 1302 - RNA, 20 nt, synthetic construct
  source 1..20: mol_type = other RNA
ttccagggacggggcccaca

SEQ ID NO: 1303 - RNA, 20 nt, synthetic construct
  source 1..20: mol_type = other RNA
ttcccgaaggtaggagaagg

SEQ ID NO: 1304 - RNA, 20 nt, synthetic construct
  source 1..20: mol_type = other RNA
ttcctcgaggaggtggcaga

SEQ ID NO: 1305 - RNA, 20 nt, synthetic construct
  source 1..20: mol_type = other RNA
ttcgggaatctggtgagtct

SEQ ID NO: 1306 - RNA, 20 nt, synthetic construct
  source 1..20: mol_type = other RNA
ttctagacctcgtcctttgc

SEQ ID NO: 1307 - RNA, 20 nt, synthetic construct
  source 1..20: mol_type = other RNA
ttctcctaccttcgggaatc

SEQ ID NO: 1308 - RNA, 20 nt, synthetic construct
  source 1..20: mol_type = other RNA
ttgcctgctggggccttcct

SEQ ID NO: 1309 - RNA, 20 nt, synthetic construct
  source 1..20: mol_type = other RNA
ttgctggctgtggagcggac

SEQ ID NO: 1310 - RNA, 20 nt, synthetic construct
  source 1..20: mol_type = other RNA
ttggctatgcacagcagatc

SEQ ID NO: 1311 - RNA, 20 nt, synthetic construct
  source 1..20: mol_type = other RNA
ttggctcactctctgtctgg

SEQ ID NO: 1312 - RNA, 20 nt, synthetic construct
  source 1..20: mol_type = other RNA
ttgggcagttccagggacgg

SEQ ID NO: 1313 - RNA, 20 nt, synthetic construct
  source 1..20: mol_type = other RNA
tttgctggctgtggagcgga

SEQ ID NO: 1314 - RNA, 20 nt, synthetic construct
  source 1..20: mol_type = other RNA
tttggctcactctctgtctg

SEQ ID NO: 1315 - RNA, 21 nt, synthetic construct
  source 1..21: mol_type = other RNA
aaaaggcctgcctcccccctc

SEQ ID NO: 1316 - RNA, 21 nt, synthetic construct
  source 1..21: mol_type = other RNA
aaaggacgaggtctagaaggc

SEQ ID NO: 1317 - RNA, 21 nt, synthetic construct
  source 1..21: mol_type = other RNA
aaaggcctgcctcccccctca

SEQ ID NO: 1318 - RNA, 21 nt, synthetic construct
  source 1..21: mol_type = other RNA
aaaggtgctggacccagagga

SEQ ID NO: 1319 - RNA, 21 nt, synthetic construct
  source 1..21: mol_type = other RNA
aactgcccaagccagtcatgc

SEQ ID NO: 1320 - RNA, 21 nt, synthetic construct
  source 1..21: mol_type = other RNA
aagaccttctcctaccttcgg

SEQ ID NO: 1321 - RNA, 21 nt, synthetic construct
  source 1..21: mol_type = other RNA
aagccagtcatgcagcccttg

SEQ ID NO: 1322 - RNA, 21 nt, synthetic construct
  source 1..21: mol_type = other RNA
aaggacgaggtctagaaggca

SEQ ID NO: 1323 - RNA, 21 nt, synthetic construct
  source 1..21: mol_type = other RNA
aaggccccagcaggcaagggc

SEQ ID NO: 1324 - RNA, 21 nt, synthetic construct
  source 1..21: mol_type = other RNA
aaggcctgcctcccccctcag

SEQ ID NO: 1325 - RNA, 21 nt, synthetic construct
  source 1..21: mol_type = other RNA
aagggctgcatgactggcttg

SEQ ID NO: 1326 - RNA, 21 nt, synthetic construct
  source 1..21: mol_type = other RNA
aaggtaggagaaggtcttggc

SEQ ID NO: 1327 - RNA, 21 nt, synthetic construct
  source 1..21: mol_type = other RNA
aaggtcttggctatgcacagc

SEQ ID NO: 1328 - RNA, 21 nt, synthetic construct
  source 1..21: mol_type = other RNA
aaggtgctggacccagaggag

SEQ ID NO: 1329 - RNA, 21 nt, synthetic construct
  source 1..21: mol_type = other RNA
aatctggtgagtctgaggggg

SEQ ID NO: 1330 - RNA, 21 nt, synthetic construct
  source 1..21: mol_type = other RNA
acagagagtgagccaaaggtg

SEQ ID NO: 1331 - RNA, 21 nt, synthetic construct
  source 1..21: mol_type = other RNA
acagcagatcctcctctgggt

SEQ ID NO: 1332 - RNA, 21 nt, synthetic construct
  source 1..21: mol_type = other RNA
acagccagcaaaggacgaggt

SEQ ID NO: 1333 - RNA, 21 nt, synthetic construct
  source 1..21: mol_type = other RNA
acaggggccgctgcccagtcc

SEQ ID NO: 1334 - RNA, 21 nt, synthetic construct
  source 1..21: mol_type = other RNA
accagattcccgaaggtagga

SEQ ID NO: 1335 - RNA, 21 nt, synthetic construct
  source 1..21: mol_type = other RNA
acccagaggaggatctgctgt

SEQ ID NO: 1336 - RNA, 21 nt, synthetic construct
  source 1..21: mol_type = other RNA
accccagcccagacagagagt

SEQ ID NO: 1337 - RNA, 21 nt, synthetic construct
  source 1..21: mol_type = other RNA
accctctgccacctcctcgag

SEQ ID NO: 1338 - RNA, 21 nt, synthetic construct
  source 1..21: mol_type = other RNA
acctcctcgaggaaggcccca

SEQ ID NO: 1339 - RNA, 21 nt, synthetic construct
  source 1..21: mol_type = other RNA
acctcgtcctttgctggctgt

SEQ ID NO: 1340 - RNA, 21 nt, synthetic construct
  source 1..21: mol_type = other RNA
accttcgggaatctggtgagt

SEQ ID NO: 1341 - RNA, 21 nt, synthetic construct
  source 1..21: mol_type = other RNA
accttctcctaccttcgggaa

SEQ ID NO: 1342 - RNA, 21 nt, synthetic construct
  source 1..21: mol_type = other RNA
acctttggctcactctctgtc

SEQ ID NO: 1343 - RNA, 21 nt, synthetic construct
  source 1..21: mol_type = other RNA
acgaggtctagaaggcagtgg

SEQ ID NO: 1344 - RNA, 21 nt, synthetic construct
  source 1..21: mol_type = other RNA
actcaccagattcccgaaggt

SEQ ID NO: 1345 - RNA, 21 nt, synthetic construct
  source 1..21: mol_type = other RNA
actcactgctcatccactgcc

SEQ ID NO: 1346 - RNA, 21 nt, synthetic construct
  source 1..21: mol_type = other RNA
actctctgtctgggctggggt

SEQ ID NO: 1347 - RNA, 21 nt, synthetic construct
  source 1..21: mol_type = other RNA
actgcccaagccagtcatgca

SEQ ID NO: 1348 - RNA, 21 nt, synthetic construct
  source 1..21: mol_type = other RNA
actgccttctagacctcgtcc

SEQ ID NO: 1349 - RNA, 21 nt, synthetic construct
  source 1..21: mol_type = other RNA
actgctcatccactgccttct

SEQ ID NO: 1350 - RNA, 21 nt, synthetic construct
  source 1..21: mol_type = other RNA
actggcttgggcagttccagg

SEQ ID NO: 1351 - RNA, 21 nt, synthetic construct
  source 1..21: mol_type = other RNA
actgggcagcggcccctgtgg

SEQ ID NO: 1352 - RNA, 21 nt, synthetic construct
  source 1..21: mol_type = other RNA
agaaggcagtggatgagcagt

SEQ ID NO: 1353 - RNA, 21 nt, synthetic construct
  source 1..21: mol_type = other RNA
agaaggtcttggctatgcaca

SEQ ID NO: 1354 - RNA, 21 nt, synthetic construct
  source 1..21: mol_type = other RNA
agacagagagtgagccaaagg

SEQ ID NO: 1355 - RNA, 21 nt, synthetic construct
  source 1..21: mol_type = other RNA
agacctcgtcctttgctggct

SEQ ID NO: 1356 - RNA, 21 nt, synthetic construct
  source 1..21: mol_type = other RNA
agaccttctcctaccttcggg

SEQ ID NO: 1357 - RNA, 21 nt, synthetic construct
  source 1..21: mol_type = other RNA
agactcaccagattcccgaag

SEQ ID NO: 1358 - RNA, 21 nt, synthetic construct
  source 1..21: mol_type = other RNA
agagagtgagccaaaggtgct

SEQ ID NO: 1359 - RNA, 21 nt, synthetic construct
  source 1..21: mol_type = other RNA
agaggaggatctgctgtgcat

SEQ ID NO: 1360 - RNA, 21 nt, synthetic construct
  source 1..21: mol_type = other RNA
agagggtaccccagcccagac

SEQ ID NO: 1361 - RNA, 21 nt, synthetic construct
  source 1..21: mol_type = other RNA
agagtgagccaaaggtgctgg

SEQ ID NO: 1362 - RNA, 21 nt, synthetic construct
  source 1..21: mol_type = other RNA
agatcctcctctgggtccagc

SEQ ID NO: 1363 - RNA, 21 nt, synthetic construct
  source 1..21: mol_type = other RNA
agattcccgaaggtaggagaa

SEQ ID NO: 1364 - RNA, 21 nt, synthetic construct
  source 1..21: mol_type = other RNA
agcaaaggacgaggtctagaa

SEQ ID NO: 1365 - RNA, 21 nt, synthetic construct
  source 1..21: mol_type = other RNA
agcacctttggctcactctct

SEQ ID NO: 1366 - RNA, 21 nt, synthetic construct
  source 1..21: mol_type = other RNA
agcagatcctcctctgggtcc

SEQ ID NO: 1367 - RNA, 21 nt, synthetic construct
  source 1..21: mol_type = other RNA
agcaggcaagggctgcatgac

SEQ ID NO: 1368 - RNA, 21 nt, synthetic construct
  source 1..21: mol_type = other RNA
agccaaaggtgctggacccag

SEQ ID NO: 1369 - RNA, 21 nt, synthetic construct
  source 1..21: mol_type = other RNA
agccaagaccttctcctacct

SEQ ID NO: 1370 - RNA, 21 nt, synthetic construct
  source 1..21: mol_type = other RNA
agccagcaaaggacgaggtct

SEQ ID NO: 1371 - RNA, 21 nt, synthetic construct
  source 1..21: mol_type = other RNA
agccagtcatgcagcccttgc

SEQ ID NO: 1372 - RNA, 21 nt, synthetic construct
  source 1..21: mol_type = other RNA
agcccagacagagagtgagcc

SEQ ID NO: 1373 - RNA, 21 nt, synthetic construct
  source 1..21: mol_type = other RNA
agcccttgcctgctggggcct

SEQ ID NO: 1374 - RNA, 21 nt, synthetic construct
  source 1..21: mol_type = other RNA
aggaaaaggcctgcctccccc

SEQ ID NO: 1375 - RNA, 21 nt, synthetic construct
  source 1..21: mol_type = other RNA
aggaaggccccagcaggcaag

SEQ ID NO: 1376 - RNA, 21 nt, synthetic construct
  source 1..21: mol_type = other RNA
aggacgaggtctagaaggcag

SEQ ID NO: 1377 - RNA, 21 nt, synthetic construct
  source 1..21: mol_type = other RNA
aggagaaggtcttggctatgc

SEQ ID NO: 1378 - RNA, 21 nt, synthetic construct
  source 1..21: mol_type = other RNA
aggaggatctgctgtgcatag

SEQ ID NO: 1379 - RNA, 21 nt, synthetic construct
  source 1..21: mol_type = other RNA
aggaggtggcagagggtaccc

SEQ ID NO: 1380 - RNA, 21 nt, synthetic construct
  source 1..21: mol_type = other RNA
aggatctgctgtgcatagcca

SEQ ID NO: 1381 - RNA, 21 nt, synthetic construct
  source 1..21: mol_type = other RNA
aggcaagggctgcatgactgg

SEQ ID NO: 1382 - RNA, 21 nt, synthetic construct
  source 1..21: mol_type = other RNA
aggccccagcaggcaagggct

SEQ ID NO: 1383 - RNA, 21 nt, synthetic construct
  source 1..21: mol_type = other RNA
aggcctgcctcccccctcaga

SEQ ID NO: 1384 - RNA, 21 nt, synthetic construct
  source 1..21: mol_type = other RNA
agggctgcatgactggcttgg

SEQ ID NO: 1385 - RNA, 21 nt, synthetic construct
  source 1..21: mol_type = other RNA
agggtaccccagcccagacag

SEQ ID NO: 1386 - RNA, 21 nt, synthetic construct
  source 1..21: mol_type = other RNA
aggtaggagaaggtcttggct

SEQ ID NO: 1387 - RNA, 21 nt, synthetic construct
  source 1..21: mol_type = other RNA
aggtctagaaggcagtggatg

SEQ ID NO: 1388 - RNA, 21 nt, synthetic construct
  source 1..21: mol_type = other RNA
aggtcttggctatgcacagca

SEQ ID NO: 1389 - RNA, 21 nt, synthetic construct
  source 1..21: mol_type = other RNA
aggtgctggacccagaggagg

SEQ ID NO: 1390 - RNA, 21 nt, synthetic construct
  source 1..21: mol_type = other RNA
aggtggcagagggtaccccag

SEQ ID NO: 1391 - RNA, 21 nt, synthetic construct
  source 1..21: mol_type = other RNA
agtcatgcagcccttgcctgc

SEQ ID NO: 1392 - RNA, 21 nt, synthetic construct
  source 1..21: mol_type = other RNA
agtccgctccacagccagcaa

SEQ ID NO: 1393 - RNA, 21 nt, synthetic construct
  source 1..21: mol_type = other RNA
agtctgaggggggaggcaggc

SEQ ID NO: 1394 - RNA, 21 nt, synthetic construct
  source 1..21: mol_type = other RNA
agtgagccaaaggtgctggac

SEQ ID NO: 1395 - RNA, 21 nt, synthetic construct
  source 1..21: mol_type = other RNA
agttccagggacggggcccac

SEQ ID NO: 1396 - RNA, 21 nt, synthetic construct
  source 1..21: mol_type = other RNA
atagccaagaccttctcctac

SEQ ID NO: 1397 - RNA, 21 nt, synthetic construct
  source 1..21: mol_type = other RNA
atccactgccttctagacctc

SEQ ID NO: 1398 - RNA, 21 nt, synthetic construct
  source 1..21: mol_type = other RNA
atcctcctctgggtccagcac

SEQ ID NO: 1399 - RNA, 21 nt, synthetic construct
  source 1..21: mol_type = other RNA
atctgctgtgcatagccaaga

SEQ ID NO: 1400 - RNA, 21 nt, synthetic construct
  source 1..21: mol_type = other RNA
atctggtgagtctgagggggg

SEQ ID NO: 1401 - RNA, 21 nt, synthetic construct
  source 1..21: mol_type = other RNA
atgactggcttgggcagttcc

SEQ ID NO: 1402 - RNA, 21 nt, synthetic construct
  source 1..21: mol_type = other RNA
atgcacagcagatcctcctct

SEQ ID NO: 1403 - RNA, 21 nt, synthetic construct
  source 1..21: mol_type = other RNA
atgcagcccttgcctgctggg

SEQ ID NO: 1404 - RNA, 21 nt, synthetic construct
  source 1..21: mol_type = other RNA
attcccgaaggtaggagaagg

SEQ ID NO: 1405 - RNA, 21 nt, synthetic construct
  source 1..21: mol_type = other RNA
caaaggacgaggtctagaagg

SEQ ID NO: 1406 - RNA, 21 nt, synthetic construct
  source 1..21: mol_type = other RNA
caaaggtgctggacccagagg

SEQ ID NO: 1407 - RNA, 21 nt, synthetic construct
  source 1..21: mol_type = other RNA
caagaccttctcctaccttcg

SEQ ID NO: 1408 - RNA, 21 nt, synthetic construct
  source 1..21: mol_type = other RNA
caagccagtcatgcagccctt

SEQ ID NO: 1409 - RNA, 21 nt, synthetic construct
  source 1..21: mol_type = other RNA
caagggctgcatgactggctt

SEQ ID NO: 1410 - RNA, 21 nt, synthetic construct
  source 1..21: mol_type = other RNA
cacagcagatcctcctctggg

SEQ ID NO: 1411 - RNA, 21 nt, synthetic construct
  source 1..21: mol_type = other RNA
cacagccagcaaaggacgagg

SEQ ID NO: 1412 - RNA, 21 nt, synthetic construct
  source 1..21: mol_type = other RNA
cacaggggccgctgcccagtc

SEQ ID NO: 1413 - RNA, 21 nt, synthetic construct
  source 1..21: mol_type = other RNA
caccagattcccgaaggtagg

SEQ ID NO: 1414 - RNA, 21 nt, synthetic construct
  source 1..21: mol_type = other RNA
cacctcctcgaggaaggcccc

SEQ ID NO: 1415 - RNA, 21 nt, synthetic construct
  source 1..21: mol_type = other RNA
cacctttggctcactctctgt

SEQ ID NO: 1416 - RNA, 21 nt, synthetic construct
  source 1..21: mol_type = other RNA
cactcactgctcatccactgc

SEQ ID NO: 1417 - RNA, 21 nt, synthetic construct
  source 1..21: mol_type = other RNA
cactctctgtctgggctgggg

SEQ ID NO: 1418 - RNA, 21 nt, synthetic construct
  source 1..21: mol_type = other RNA
cactgccttctagacctcgtc

SEQ ID NO: 1419 - RNA, 21 nt, synthetic construct
  source 1..21: mol_type = other RNA
cactgctcatccactgccttc

SEQ ID NO: 1420 - RNA, 21 nt, synthetic construct
  source 1..21: mol_type = other RNA
cagacagagagtgagccaaag

SEQ ID NO: 1421 - RNA, 21 nt, synthetic construct
  source 1..21: mol_type = other RNA
cagactcaccagattcccgaa

SEQ ID NO: 1422 - RNA, 21 nt, synthetic construct
  source 1..21: mol_type = other RNA
cagagagtgagccaaaggtgc

SEQ ID NO: 1423 - RNA, 21 nt, synthetic construct
  source 1..21: mol_type = other RNA
cagaggaggatctgctgtgca

SEQ ID NO: 1424 - RNA, 21 nt, synthetic construct
  source 1..21: mol_type = other RNA
cagagggtaccccagcccaga

SEQ ID NO: 1425 - RNA, 21 nt, synthetic construct
  source 1..21: mol_type = other RNA
cagatcctcctctgggtccag

SEQ ID NO: 1426 - RNA, 21 nt, synthetic construct
  source 1..21: mol_type = other RNA
cagattcccgaaggtaggaga

SEQ ID NO: 1427 - RNA, 21 nt, synthetic construct
  source 1..21: mol_type = other RNA
cagcaaaggacgaggtctaga

SEQ ID NO: 1428 - RNA, 21 nt, synthetic construct
  source 1..21: mol_type = other RNA
cagcacctttggctcactctc

SEQ ID NO: 1429 - RNA, 21 nt, synthetic construct
  source 1..21: mol_type = other RNA
cagcagatcctcctctgggtc

SEQ ID NO: 1430 - RNA, 21 nt, synthetic construct
  source 1..21: mol_type = other RNA
cagcaggcaagggctgcatga

SEQ ID NO: 1431 - RNA, 21 nt, synthetic construct
  source 1..21: mol_type = other RNA
cagccagcaaaggacgaggtc

SEQ ID NO: 1432 - RNA, 21 nt, synthetic construct
  source 1..21: mol_type = other RNA
cagcccagacagagagtgagc

SEQ ID NO: 1433 - RNA, 21 nt, synthetic construct
  source 1..21: mol_type = other RNA
cagcccttgcctgctggggcc

SEQ ID NO: 1434 - RNA, 21 nt, synthetic construct
  source 1..21: mol_type = other RNA
caggcaagggctgcatgactg

SEQ ID NO: 1435 - RNA, 21 nt, synthetic construct
  source 1..21: mol_type = other RNA
cagtcatgcagcccttgcctg

SEQ ID NO: 1436 - RNA, 21 nt, synthetic construct
  source 1..21: mol_type = other RNA
cagtccgctccacagccagca

SEQ ID NO: 1437 - RNA, 21 nt, synthetic construct
  source 1..21: mol_type = other RNA
cagttccagggacggggccca

SEQ ID NO: 1438 - RNA, 21 nt, synthetic construct
  source 1..21: mol_type = other RNA
catagccaagaccttctccta

SEQ ID NO: 1439 - RNA, 21 nt, synthetic construct
  source 1..21: mol_type = other RNA
catccactgccttctagacct

SEQ ID NO: 1440 - RNA, 21 nt, synthetic construct
  source 1..21: mol_type = other RNA
catgactggcttgggcagttc

SEQ ID NO: 1441 - RNA, 21 nt, synthetic construct
  source 1..21: mol_type = other RNA
catgcagcccttgcctgctgg

SEQ ID NO: 1442 - RNA, 21 nt, synthetic construct
  source 1..21: mol_type = other RNA
ccaaaggtgctggacccagag

SEQ ID NO: 1443 - RNA, 21 nt, synthetic construct
  source 1..21: mol_type = other RNA
ccaagaccttctcctaccttc

SEQ ID NO: 1444 - RNA, 21 nt, synthetic construct
  source 1..21: mol_type = other RNA
ccaagccagtcatgcagccct

SEQ ID NO: 1445 - RNA, 21 nt, synthetic construct
  source 1..21: mol_type = other RNA
ccacagccagcaaaggacgag

SEQ ID NO: 1446 - RNA, 21 nt, synthetic construct
  source 1..21: mol_type = other RNA
ccacaggggccgctgcccagt

SEQ ID NO: 1447 - RNA, 21 nt, synthetic construct
  source 1..21: mol_type = other RNA
ccacctcctcgaggaaggccc

SEQ ID NO: 1448 - RNA, 21 nt, synthetic construct
  source 1..21: mol_type = other RNA
ccactcactgctcatccactg

SEQ ID NO: 1449 - RNA, 21 nt, synthetic construct
  source 1..21: mol_type = other RNA
ccactgccttctagacctcgt

SEQ ID NO: 1450 - RNA, 21 nt, synthetic construct
  source 1..21: mol_type = other RNA
ccagacagagagtgagccaaa

SEQ ID NO: 1451 - RNA, 21 nt, synthetic construct
  source 1..21: mol_type = other RNA
ccagaggaggatctgctgtgc

SEQ ID NO: 1452 - RNA, 21 nt, synthetic construct
  source 1..21: mol_type = other RNA
ccagattcccgaaggtaggag

SEQ ID NO: 1453 - RNA, 21 nt, synthetic construct
  source 1..21: mol_type = other RNA
ccagcaaaggacgaggtctag

SEQ ID NO: 1454 - RNA, 21 nt, synthetic construct
  source 1..21: mol_type = other RNA
ccagcacctttggctcactct

SEQ ID NO: 1455 - RNA, 21 nt, synthetic construct
  source 1..21: mol_type = other RNA
ccagcaggcaagggctgcatg

SEQ ID NO: 1456 - RNA, 21 nt, synthetic construct
  source 1..21: mol_type = other RNA
ccagcccagacagagagtgag

SEQ ID NO: 1457 - RNA, 21 nt, synthetic construct
  source 1..21: mol_type = other RNA
ccagtcatgcagcccttgcct

SEQ ID NO: 1458 - RNA, 21 nt, synthetic construct
  source 1..21: mol_type = other RNA
ccagtccgctccacagccagc

SEQ ID NO: 1459 - RNA, 21 nt, synthetic construct
  source 1..21: mol_type = other RNA
cccaagccagtcatgcagccc

SEQ ID NO: 1460 - RNA, 21 nt, synthetic construct
  source 1..21: mol_type = other RNA
cccagacagagagtgagccaa

SEQ ID NO: 1461 - RNA, 21 nt, synthetic construct
  source 1..21: mol_type = other RNA
cccagaggaggatctgctgtg

SEQ ID NO: 1462 - RNA, 21 nt, synthetic construct
  source 1..21: mol_type = other RNA
cccagcaggcaagggctgcat

SEQ ID NO: 1463 - RNA, 21 nt, synthetic construct
  source 1..21: mol_type = other RNA
cccagcccagacagagagtga

SEQ ID NO: 1464 - RNA, 21 nt, synthetic construct
  source 1..21: mol_type = other RNA
cccagtccgctccacagccag

SEQ ID NO: 1465 - RNA, 21 nt, synthetic construct
  source 1..21: mol_type = other RNA
ccccagcaggcaagggctgca

SEQ ID NO: 1466 - RNA, 21 nt, synthetic construct
  source 1..21: mol_type = other RNA
ccccagcccagacagagagtg

SEQ ID NO: 1467 - RNA, 21 nt, synthetic construct
  source 1..21: mol_type = other RNA
cccccctcagactcaccagat

SEQ ID NO: 1468 - RNA, 21 nt, synthetic construct
  source 1..21: mol_type = other RNA
ccccctcagactcaccagatt

SEQ ID NO: 1469 - RNA, 21 nt, synthetic construct
  source 1..21: mol_type = other RNA
ccccgtccctggaactgccca

SEQ ID NO: 1470 - RNA, 21 nt, synthetic construct
  source 1..21: mol_type = other RNA
cccctcagactcaccagattc

SEQ ID NO: 1471 - RNA, 21 nt, synthetic construct
  source 1..21: mol_type = other RNA
cccgaaggtaggagaaggtct

SEQ ID NO: 1472 - RNA, 21 nt, synthetic construct
  source 1..21: mol_type = other RNA
cccgtccctggaactgcccaa

SEQ ID NO: 1473 - RNA, 21 nt, synthetic construct
  source 1..21: mol_type = other RNA
ccctcagactcaccagattcc

SEQ ID NO: 1474 - RNA, 21 nt, synthetic construct
  source 1..21: mol_type = other RNA
ccctctgccacctcctcgagg

SEQ ID NO: 1475 - RNA, 21 nt, synthetic construct
  source 1..21: mol_type = other RNA
ccctggaactgcccaagccag

SEQ ID NO: 1476 - RNA, 21 nt, synthetic construct
  source 1..21: mol_type = other RNA
cccttgcctgctggggccttc

SEQ ID NO: 1477 - RNA, 21 nt, synthetic construct
  source 1..21: mol_type = other RNA
ccgaaggtaggagaaggtctt

SEQ ID NO: 1478 - RNA, 21 nt, synthetic construct
  source 1..21: mol_type = other RNA
ccgctccacagccagcaaagg

SEQ ID NO: 1479 - RNA, 21 nt, synthetic construct
  source 1..21: mol_type = other RNA
ccgctgcccagtccgctccac

SEQ ID NO: 1480 - RNA, 21 nt, synthetic construct
  source 1..21: mol_type = other RNA
ccgtccctggaactgcccaag

SEQ ID NO: 1481 - RNA, 21 nt, synthetic construct
  source 1..21: mol_type = other RNA
cctaccttcgggaatctggtg

SEQ ID NO: 1482 - RNA, 21 nt, synthetic construct
  source 1..21: mol_type = other RNA
cctcagactcaccagattccc

SEQ ID NO: 1483 - RNA, 21 nt, synthetic construct
  source 1..21: mol_type = other RNA
cctcccccctcagactcacca

SEQ ID NO: 1484 - RNA, 21 nt, synthetic construct
  source 1..21: mol_type = other RNA
cctcctcgaggaaggccccag

SEQ ID NO: 1485 - RNA, 21 nt, synthetic construct
  source 1..21: mol_type = other RNA
cctcctctgggtccagcacct

SEQ ID NO: 1486 - RNA, 21 nt, synthetic construct
  source 1..21: mol_type = other RNA
cctcgaggaaggccccagcag

SEQ ID NO: 1487 - RNA, 21 nt, synthetic construct
  source 1..21: mol_type = other RNA
cctcgaggaggtggcagaggg

SEQ ID NO: 1488 - RNA, 21 nt, synthetic construct
  source 1..21: mol_type = other RNA
cctcgtcctttgctggctgtg

SEQ ID NO: 1489 - RNA, 21 nt, synthetic construct
  source 1..21: mol_type = other RNA
cctctgccacctcctcgagga

SEQ ID NO: 1490 - RNA, 21 nt, synthetic construct
  source 1..21: mol_type = other RNA
cctctgggtccagcacctttg

SEQ ID NO: 1491 - RNA, 21 nt, synthetic construct
  source 1..21: mol_type = other RNA
cctgcctcccccctcagactc

SEQ ID NO: 1492 - RNA, 21 nt, synthetic construct
  source 1..21: mol_type = other RNA
cctgctggggccttcctcgag

SEQ ID NO: 1493 - RNA, 21 nt, synthetic construct
  source 1..21: mol_type = other RNA
cctggaactgcccaagccagt

SEQ ID NO: 1494 - RNA, 21 nt, synthetic construct
  source 1..21: mol_type = other RNA
cctgtgggccccgtccctgga

SEQ ID NO: 1495 - RNA, 21 nt, synthetic construct
  source 1..21: mol_type = other RNA
ccttcctcgaggaggtggcag

SEQ ID NO: 1496 - RNA, 21 nt, synthetic construct
  source 1..21: mol_type = other RNA
ccttcgggaatctggtgagtc

SEQ ID NO: 1497 - RNA, 21 nt, synthetic construct
  source 1..21: mol_type = other RNA
ccttctagacctcgtcctttg

SEQ ID NO: 1498 - RNA, 21 nt, synthetic construct
  source 1..21: mol_type = other RNA
ccttctcctaccttcgggaat

SEQ ID NO: 1499 - RNA, 21 nt, synthetic construct
  source 1..21: mol_type = other RNA
ccttgcctgctggggccttcc

SEQ ID NO: 1500 - RNA, 21 nt, synthetic construct
  source 1..21: mol_type = other RNA
cctttgctggctgtggagcgg

SEQ ID NO: 1501 - RNA, 21 nt, synthetic construct
  source 1..21: mol_type = other RNA
cctttggctcactctctgtct

SEQ ID NO: 1502 - RNA, 21 nt, synthetic construct
  source 1..21: mol_type = other RNA
cgaaggtaggagaaggtcttg

SEQ ID NO: 1503 - RNA, 21 nt, synthetic construct
  source 1..21: mol_type = other RNA
cgaggaaggccccagcaggca

SEQ ID NO: 1504 - RNA, 21 nt, synthetic construct
  source 1..21: mol_type = other RNA
cgaggaggtggcagagggtac

SEQ ID NO: 1505 - RNA, 21 nt, synthetic construct
  source 1..21: mol_type = other RNA
cgaggtctagaaggcagtgga

SEQ ID NO: 1506 - RNA, 21 nt, synthetic construct
  source 1..21: mol_type = other RNA
cgctccacagccagcaaagga

SEQ ID NO: 1507 - RNA, 21 nt, synthetic construct
  source 1..21: mol_type = other RNA
cgctgcccagtccgctccaca

SEQ ID NO: 1508 - RNA, 21 nt, synthetic construct
  source 1..21: mol_type = other RNA
cgggaatctggtgagtctgag

SEQ ID NO: 1509 - RNA, 21 nt, synthetic construct
  source 1..21: mol_type = other RNA
cgtccctggaactgcccaagc

SEQ ID NO: 1510 - RNA, 21 nt, synthetic construct
  source 1..21: mol_type = other RNA
cgtcctttgctggctgtggag

SEQ ID NO: 1511 - RNA, 21 nt, synthetic construct
  source 1..21: mol_type = other RNA
ctaccttcgggaatctggtga

SEQ ID NO: 1512 - RNA, 21 nt, synthetic construct
  source 1..21: mol_type = other RNA
ctagaaggcagtggatgagca

SEQ ID NO: 1513 - RNA, 21 nt, synthetic construct
  source 1..21: mol_type = other RNA
ctagacctcgtcctttgctgg

SEQ ID NO: 1514 - RNA, 21 nt, synthetic construct
  source 1..21: mol_type = other RNA
ctatgcacagcagatcctcct

SEQ ID NO: 1515 - RNA, 21 nt, synthetic construct
  source 1..21: mol_type = other RNA
ctcaccagattcccgaaggta

SEQ ID NO: 1516 - RNA, 21 nt, synthetic construct
  source 1..21: mol_type = other RNA
ctcactctctgtctgggctgg

SEQ ID NO: 1517 - RNA, 21 nt, synthetic construct
  source 1..21: mol_type = other RNA
ctcactgctcatccactgcct

SEQ ID NO: 1518 - RNA, 21 nt, synthetic construct
  source 1..21: mol_type = other RNA
ctcagactcaccagattcccg

SEQ ID NO: 1519 - RNA, 21 nt, synthetic construct
  source 1..21: mol_type = other RNA
ctcatccactgccttctagac

SEQ ID NO: 1520 - RNA, 21 nt, synthetic construct
  source 1..21: mol_type = other RNA
ctccacagccagcaaaggacg

SEQ ID NO: 1521 - RNA, 21 nt, synthetic construct
  source 1..21: mol_type = other RNA
ctccactcactgctcatccac

SEQ ID NO: 1522 - RNA, 21 nt, synthetic construct
  source 1..21: mol_type = other RNA
ctcccccctcagactcaccag

SEQ ID NO: 1523 - RNA, 21 nt, synthetic construct
  source 1..21: mol_type = other RNA
ctcctaccttcgggaatctgg

SEQ ID NO: 1524 - RNA, 21 nt, synthetic construct
  source 1..21: mol_type = other RNA
ctcctcgaggaaggccccagc

SEQ ID NO: 1525 - RNA, 21 nt, synthetic construct
  source 1..21: mol_type = other RNA
ctcctctgggtccagcacctt

SEQ ID NO: 1526 - RNA, 21 nt, synthetic construct
  source 1..21: mol_type = other RNA
ctcgaggaaggccccagcagg

SEQ ID NO: 1527 - RNA, 21 nt, synthetic construct
  source 1..21: mol_type = other RNA
ctcgaggaggtggcagagggt

SEQ ID NO: 1528 - RNA, 21 nt, synthetic construct
  source 1..21: mol_type = other RNA
ctcgtcctttgctggctgtgg

SEQ ID NO: 1529 - RNA, 21 nt, synthetic construct
  source 1..21: mol_type = other RNA
ctctctgtctgggctggggta

SEQ ID NO: 1530 - RNA, 21 nt, synthetic construct
  source 1..21: mol_type = other RNA
ctctgccacctcctcgaggaa

SEQ ID NO: 1531 - RNA, 21 nt, synthetic construct
  source 1..21: mol_type = other RNA
ctctgggtccagcacctttgg

SEQ ID NO: 1532 - RNA, 21 nt, synthetic construct
  source 1..21: mol_type = other RNA
ctctgtctgggctggggtacc

SEQ ID NO: 1533 - RNA, 21 nt, synthetic construct
  source 1..21: mol_type = other RNA
ctgcatgactggcttgggcag

SEQ ID NO: 1534 - RNA, 21 nt, synthetic construct
  source 1..21: mol_type = other RNA
ctgccacctcctcgaggaagg

SEQ ID NO: 1535 - RNA, 21 nt, synthetic construct
  source 1..21: mol_type = other RNA
ctgcccaagccagtcatgcag

SEQ ID NO: 1536 - RNA, 21 nt, synthetic construct
  source 1..21: mol_type = other RNA
ctgcccagtccgctccacagc

SEQ ID NO: 1537 - RNA, 21 nt, synthetic construct
  source 1..21: mol_type = other RNA
ctgcctcccccctcagactca

SEQ ID NO: 1538 - RNA, 21 nt, synthetic construct
  source 1..21: mol_type = other RNA
ctgccttctagacctcgtcct

SEQ ID NO: 1539 - RNA, 21 nt, synthetic construct
  source 1..21: mol_type = other RNA
ctgctcatccactgccttcta

SEQ ID NO: 1540 - RNA, 21 nt, synthetic construct
  source 1..21: mol_type = other RNA
ctgctggggccttcctcgagg

SEQ ID NO: 1541 - RNA, 21 nt, synthetic construct
  source 1..21: mol_type = other RNA
ctgctgtgcatagccaagacc

SEQ ID NO: 1542 - RNA, 21 nt, synthetic construct
  source 1..21: mol_type = other RNA
ctggaactgcccaagccagtc

SEQ ID NO: 1543 - RNA, 21 nt, synthetic construct
  source 1..21: mol_type = other RNA
ctggacccagaggaggatctg

SEQ ID NO: 1544 - RNA, 21 nt, synthetic construct
  source 1..21: mol_type = other RNA
ctggctgtggagcggactggg

SEQ ID NO: 1545 - RNA, 21 nt, synthetic construct
  source 1..21: mol_type = other RNA
ctggcttgggcagttccaggg

SEQ ID NO: 1546 - RNA, 21 nt, synthetic construct
  source 1..21: mol_type = other RNA
ctgggctggggtaccctctgc

SEQ ID NO: 1547 - RNA, 21 nt, synthetic construct
  source 1..21: mol_type = other RNA
ctggggccttcctcgaggagg

SEQ ID NO: 1548 - RNA, 21 nt, synthetic construct
  source 1..21: mol_type = other RNA
ctggggtaccctctgccacct

SEQ ID NO: 1549 - RNA, 21 nt, synthetic construct
  source 1..21: mol_type = other RNA
ctgggtccagcacctttggct

SEQ ID NO: 1550 - RNA, 21 nt, synthetic construct
  source 1..21: mol_type = other RNA
ctggtgagtctgaggggggag

SEQ ID NO: 1551 - RNA, 21 nt, synthetic construct
  source 1..21: mol_type = other RNA
ctgtctgggctggggtaccct

SEQ ID NO: 1552 - RNA, 21 nt, synthetic construct
  source 1..21: mol_type = other RNA
ctgtgcatagccaagaccttc

SEQ ID NO: 1553 - RNA, 21 nt, synthetic construct
  source 1..21: mol_type = other RNA
ctgtggagcggactgggcagc

SEQ ID NO: 1554 - RNA, 21 nt, synthetic construct
  source 1..21: mol_type = other RNA
ctgtgggccccgtccctggaa

SEQ ID NO: 1555 - RNA, 21 nt, synthetic construct
  source 1..21: mol_type = other RNA
cttcctcgaggaggtggcaga

SEQ ID NO: 1556 - RNA, 21 nt, synthetic construct
  source 1..21: mol_type = other RNA
cttcgggaatctggtgagtct

SEQ ID NO: 1557 - RNA, 21 nt, synthetic construct
  source 1..21: mol_type = other RNA
cttctagacctcgtcctttgc

SEQ ID NO: 1558 - RNA, 21 nt, synthetic construct
  source 1..21: mol_type = other RNA
cttctcctaccttcgggaatc

SEQ ID NO: 1559 - RNA, 21 nt, synthetic construct
  source 1..21: mol_type = other RNA
cttgcctgctggggccttcct

SEQ ID NO: 1560 - RNA, 21 nt, synthetic construct
  source 1..21: mol_type = other RNA
cttggctatgcacagcagatc

SEQ ID NO: 1561 - RNA, 21 nt, synthetic construct
  source 1..21: mol_type = other RNA
cttgggcagttccagggacgg

SEQ ID NO: 1562 - RNA, 21 nt, synthetic construct
  source 1..21: mol_type = other RNA
ctttgctggctgtggagcgga

SEQ ID NO: 1563 - RNA, 21 nt, synthetic construct
  source 1..21: mol_type = other RNA
ctttggctcactctctgtctg

SEQ ID NO: 1564 - RNA, 21 nt, synthetic construct
  source 1..21: mol_type = other RNA
gaaaaggcctgcctcccccct

SEQ ID NO: 1565 - RNA, 21 nt, synthetic construct
  source 1..21: mol_type = other RNA
gaactgcccaagccagtcatg

SEQ ID NO: 1566 - RNA, 21 nt, synthetic construct
  source 1..21: mol_type = other RNA
gaaggccccagcaggcaaggg

SEQ ID NO: 1567 - RNA, 21 nt, synthetic construct
  source 1..21: mol_type = other RNA
gaaggtaggagaaggtcttgg

SEQ ID NO: 1568 - RNA, 21 nt, synthetic construct
  source 1..21: mol_type = other RNA
gaaggtcttggctatgcacag

SEQ ID NO: 1569 - RNA, 21 nt, synthetic construct
  source 1..21: mol_type = other RNA
gaatctggtgagtctgagggg

SEQ ID NO: 1570 - RNA, 21 nt, synthetic construct
  source 1..21: mol_type = other RNA
gacagagagtgagccaaaggt

SEQ ID NO: 1571 - RNA, 21 nt, synthetic construct
  source 1..21: mol_type = other RNA
gacccagaggaggatctgctg

SEQ ID NO: 1572 - RNA, 21 nt, synthetic construct
  source 1..21: mol_type = other RNA
gacctcgtcctttgctggctg

SEQ ID NO: 1573 - RNA, 21 nt, synthetic construct
  source 1..21: mol_type = other RNA
gaccttctcctaccttcggga

SEQ ID NO: 1574 - RNA, 21 nt, synthetic construct
  source 1..21: mol_type = other RNA
gacgaggtctagaaggcagtg

SEQ ID NO: 1575 - RNA, 21 nt, synthetic construct
  source 1..21: mol_type = other RNA
gactcaccagattcccgaagg

SEQ ID NO: 1576 - RNA, 21 nt, synthetic construct
  source 1..21: mol_type = other RNA
gactggcttgggcagttccag

SEQ ID NO: 1577 - RNA, 21 nt, synthetic construct
  source 1..21: mol_type = other RNA
gactgggcagcggcccctgtg

SEQ ID NO: 1578 - RNA, 21 nt, synthetic construct
  source 1..21: mol_type = other RNA
gagaaggtcttggctatgcac

SEQ ID NO: 1579 - RNA, 21 nt, synthetic construct
  source 1..21: mol_type = other RNA
gagagtgagccaaaggtgctg

SEQ ID NO: 1580 - RNA, 21 nt, synthetic construct
  source 1..21: mol_type = other RNA
gagccaaaggtgctggaccca

SEQ ID NO: 1581 - RNA, 21 nt, synthetic construct
  source 1..21: mol_type = other RNA
gaggaaggccccagcaggcaa

SEQ ID NO: 1582 - RNA, 21 nt, synthetic construct
  source 1..21: mol_type = other RNA
gaggaggatctgctgtgcata

SEQ ID NO: 1583 - RNA, 21 nt, synthetic construct
  source 1..21: mol_type = other RNA
gaggaggtggcagagggtacc

SEQ ID NO: 1584 - RNA, 21 nt, synthetic construct
  source 1..21: mol_type = other RNA
gaggatctgctgtgcatagcc

SEQ ID NO: 1585 - RNA, 21 nt, synthetic construct
  source 1..21: mol_type = other RNA
gagggtaccccagcccagaca

SEQ ID NO: 1586 - RNA, 21 nt, synthetic construct
  source 1..21: mol_type = other RNA
gaggtctagaaggcagtggat

SEQ ID NO: 1587 - RNA, 21 nt, synthetic construct
  source 1..21: mol_type = other RNA
gaggtggcagagggtacccca

SEQ ID NO: 1588 - RNA, 21 nt, synthetic construct
  source 1..21: mol_type = other RNA
gagtctgaggggggaggcagg

SEQ ID NO: 1589 - RNA, 21 nt, synthetic construct
  source 1..21: mol_type = other RNA
gagtgagccaaaggtgctgga

SEQ ID NO: 1590 - RNA, 21 nt, synthetic construct
  source 1..21: mol_type = other RNA
gatcctcctctgggtccagca

SEQ ID NO: 1591 - RNA, 21 nt, synthetic construct
  source 1..21: mol_type = other RNA
gatctgctgtgcatagccaag

SEQ ID NO: 1592 - RNA, 21 nt, synthetic construct
  source 1..21: mol_type = other RNA
gattcccgaaggtaggagaag

SEQ ID NO: 1593 - RNA, 21 nt, synthetic construct
  source 1..21: mol_type = other RNA
gcaaaggacgaggtctagaag

SEQ ID NO: 1594 - RNA, 21 nt, synthetic construct
  source 1..21: mol_type = other RNA
gcaagggctgcatgactggct

SEQ ID NO: 1595 - RNA, 21 nt, synthetic construct
  source 1..21: mol_type = other RNA
gcacagcagatcctcctctgg

SEQ ID NO: 1596 - RNA, 21 nt, synthetic construct
  source 1..21: mol_type = other RNA
gcacctttggctcactctctg

SEQ ID NO: 1597 - RNA, 21 nt, synthetic construct
  source 1..21: mol_type = other RNA
gcagagggtaccccagcccag

SEQ ID NO: 1598 - RNA, 21 nt, synthetic construct
  source 1..21: mol_type = other RNA
gcagatcctcctctgggtcca

SEQ ID NO: 1599 - RNA, 21 nt, synthetic construct
  source 1..21: mol_type = other RNA
gcagcccttgcctgctggggc

SEQ ID NO: 1600 - RNA, 21 nt, synthetic construct
  source 1..21: mol_type = other RNA
gcaggcaagggctgcatgact

SEQ ID NO: 1601 - RNA, 21 nt, synthetic construct
  source 1..21: mol_type = other RNA
gcagttccagggacggggccc

SEQ ID NO: 1602 - RNA, 21 nt, synthetic construct
  source 1..21: mol_type = other RNA
gcatagccaagaccttctcct

SEQ ID NO: 1603 - RNA, 21 nt, synthetic construct
  source 1..21: mol_type = other RNA
gcatgactggcttgggcagtt

SEQ ID NO: 1604 - RNA, 21 nt, synthetic construct
  source 1..21: mol_type = other RNA
gccaaaggtgctggacccaga

SEQ ID NO: 1605 - RNA, 21 nt, synthetic construct
  source 1..21: mol_type = other RNA
gccaagaccttctcctacctt

SEQ ID NO: 1606 - RNA, 21 nt, synthetic construct
  source 1..21: mol_type = other RNA
gccacctcctcgaggaaggcc

SEQ ID NO: 1607 - RNA, 21 nt, synthetic construct
  source 1..21: mol_type = other RNA
gccagcaaaggacgaggtcta

SEQ ID NO: 1608 - RNA, 21 nt, synthetic construct
  source 1..21: mol_type = other RNA
gccagtcatgcagcccttgcc

SEQ ID NO: 1609 - RNA, 21 nt, synthetic construct
  source 1..21: mol_type = other RNA
gcccaagccagtcatgcagcc

SEQ ID NO: 1610 - RNA, 21 nt, synthetic construct
  source 1..21: mol_type = other RNA
gcccagacagagagtgagcca

SEQ ID NO: 1611 - RNA, 21 nt, synthetic construct
  source 1..21: mol_type = other RNA
gcccagtccgctccacagcca

SEQ ID NO: 1612 - RNA, 21 nt, synthetic construct
  source 1..21: mol_type = other RNA
gccccagcaggcaagggctgc

SEQ ID NO: 1613 - RNA, 21 nt, synthetic construct
  source 1..21: mol_type = other RNA
gccccgtccctggaactgccc

SEQ ID NO: 1614 - RNA, 21 nt, synthetic construct
  source 1..21: mol_type = other RNA
gcccttgcctgctggggcctt

SEQ ID NO: 1615 - RNA, 21 nt, synthetic construct
  source 1..21: mol_type = other RNA
gccgctgcccagtccgctcca

SEQ ID NO: 1616 - RNA, 21 nt, synthetic construct
  source 1..21: mol_type = other RNA
gcctcccccctcagactcacc

SEQ ID NO: 1617 - RNA, 21 nt, synthetic construct
  source 1..21: mol_type = other RNA
gcctgcctcccccctcagact

SEQ ID NO: 1618 - RNA, 21 nt, synthetic construct
  source 1..21: mol_type = other RNA
gcctgctggggccttcctcga

SEQ ID NO: 1619 - RNA, 21 nt, synthetic construct
  source 1..21: mol_type = other RNA
gccttcctcgaggaggtggca

SEQ ID NO: 1620 - RNA, 21 nt, synthetic construct
  source 1..21: mol_type = other RNA
gccttctagacctcgtccttt

SEQ ID NO: 1621 - RNA, 21 nt, synthetic construct
  source 1..21: mol_type = other RNA
gctatgcacagcagatcctcc

SEQ ID NO: 1622 - RNA, 21 nt, synthetic construct
  source 1..21: mol_type = other RNA
gctcactctctgtctgggctg

SEQ ID NO: 1623 - RNA, 21 nt, synthetic construct
  source 1..21: mol_type = other RNA
gctcatccactgccttctaga

SEQ ID NO: 1624 - RNA, 21 nt, synthetic construct
  source 1..21: mol_type = other RNA
gctccacagccagcaaaggac

SEQ ID NO: 1625 - RNA, 21 nt, synthetic construct
  source 1..21: mol_type = other RNA
gctgcatgactggcttgggca

SEQ ID NO: 1626 - RNA, 21 nt, synthetic construct
  source 1..21: mol_type = other RNA
gctgcccagtccgctccacag

SEQ ID NO: 1627 - RNA, 21 nt, synthetic construct
  source 1..21: mol_type = other RNA
gctggacccagaggaggatct

SEQ ID NO: 1628 - RNA, 21 nt, synthetic construct
  source 1..21: mol_type = other RNA
gctggctgtggagcggactgg

SEQ ID NO: 1629 - RNA, 21 nt, synthetic construct
  source 1..21: mol_type = other RNA
gctggggccttcctcgaggag

SEQ ID NO: 1630 - RNA, 21 nt, synthetic construct
  source 1..21: mol_type = other RNA
gctggggtaccctctgccacc

SEQ ID NO: 1631 - RNA, 21 nt, synthetic construct
  source 1..21: mol_type = other RNA
gctgtgcatagccaagacctt

SEQ ID NO: 1632 - RNA, 21 nt, synthetic construct
  source 1..21: mol_type = other RNA
gctgtggagcggactgggcag

SEQ ID NO: 1633 - RNA, 21 nt, synthetic construct
  source 1..21: mol_type = other RNA
gcttgggcagttccagggacg

SEQ ID NO: 1634 - RNA, 21 nt, synthetic construct
  source 1..21: mol_type = other RNA
ggaaaaggcctgcctcccccc

SEQ ID NO: 1635 - RNA, 21 nt, synthetic construct
  source 1..21: mol_type = other RNA
ggaactgcccaagccagtcat

SEQ ID NO: 1636 - RNA, 21 nt, synthetic construct
  source 1..21: mol_type = other RNA
ggaaggccccagcaggcaagg

SEQ ID NO: 1637 - RNA, 21 nt, synthetic construct
  source 1..21: mol_type = other RNA
ggaatctggtgagtctgaggg

SEQ ID NO: 1638 - RNA, 21 nt, synthetic construct
  source 1..21: mol_type = other RNA
ggacccagaggaggatctgct

SEQ ID NO: 1639 - RNA, 21 nt, synthetic construct
  source 1..21: mol_type = other RNA
ggacgaggtctagaaggcagt

SEQ ID NO: 1640 - RNA, 21 nt, synthetic construct
  source 1..21: mol_type = other RNA
ggactgggcagcggcccctgt

SEQ ID NO: 1641 - RNA, 21 nt, synthetic construct
  source 1..21: mol_type = other RNA
ggagaaggtcttggctatgca

SEQ ID NO: 1642 - RNA, 21 nt, synthetic construct
  source 1..21: mol_type = other RNA
ggaggatctgctgtgcatagc

SEQ ID NO: 1643 - RNA, 21 nt, synthetic construct
  source 1..21: mol_type = other RNA
ggaggtggcagagggtacccc

SEQ ID NO: 1644 - RNA, 21 nt, synthetic construct
  source 1..21: mol_type = other RNA
ggatctgctgtgcatagccaa

SEQ ID NO: 1645 - RNA, 21 nt, synthetic construct
  source 1..21: mol_type = other RNA
ggcaagggctgcatgactggc

SEQ ID NO: 1646 - RNA, 21 nt, synthetic construct
  source 1..21: mol_type = other RNA
ggcagagggtaccccagccca

SEQ ID NO: 1647 - RNA, 21 nt, synthetic construct
  source 1..21: mol_type = other RNA
ggcagttccagggacggggcc

SEQ ID NO: 1648 - RNA, 21 nt, synthetic construct
  source 1..21: mol_type = other RNA
ggccccagcaggcaagggctg

SEQ ID NO: 1649 - RNA, 21 nt, synthetic construct
  source 1..21: mol_type = other RNA
ggccccgtccctggaactgcc

SEQ ID NO: 1650 - RNA, 21 nt, synthetic construct
  source 1..21: mol_type = other RNA
ggcctgcctcccccctcagac

SEQ ID NO: 1651 - RNA, 21 nt, synthetic construct
  source 1..21: mol_type = other RNA
ggccttcctcgaggaggtggc

SEQ ID NO: 1652 - RNA, 21 nt, synthetic construct
  source 1..21: mol_type = other RNA
ggctatgcacagcagatcctc

SEQ ID NO: 1653 - RNA, 21 nt, synthetic construct
  source 1..21: mol_type = other RNA
ggctcactctctgtctgggct

SEQ ID NO: 1654 - RNA, 21 nt, synthetic construct
  source 1..21: mol_type = other RNA
ggctgcatgactggcttgggc

SEQ ID NO: 1655 - RNA, 21 nt, synthetic construct
  source 1..21: mol_type = other RNA
ggctggggtaccctctgccac

SEQ ID NO: 1656 - RNA, 21 nt, synthetic construct
  source 1..21: mol_type = other RNA
ggctgtggagcggactgggca

SEQ ID NO: 1657 - RNA, 21 nt, synthetic construct
  source 1..21: mol_type = other RNA
ggcttgggcagttccagggac

SEQ ID NO: 1658 - RNA, 21 nt, synthetic construct
  source 1..21: mol_type = other RNA
gggaatctggtgagtctgagg

SEQ ID NO: 1659 - RNA, 21 nt, synthetic construct
  source 1..21: mol_type = other RNA
gggcagttccagggacggggc

SEQ ID NO: 1660 - RNA, 21 nt, synthetic construct
  source 1..21: mol_type = other RNA
gggccccgtccctggaactgc

SEQ ID NO: 1661 - RNA, 21 nt, synthetic construct
  source 1..21: mol_type = other RNA
gggccttcctcgaggaggtgg

SEQ ID NO: 1662 - RNA, 21 nt, synthetic construct
  source 1..21: mol_type = other RNA
gggctgcatgactggcttggg

SEQ ID NO: 1663 - RNA, 21 nt, synthetic construct
  source 1..21: mol_type = other RNA
gggctggggtaccctctgcca

SEQ ID NO: 1664 - RNA, 21 nt, synthetic construct
  source 1..21: mol_type = other RNA
ggggccttcctcgaggaggtg

SEQ ID NO: 1665 - RNA, 21 nt, synthetic construct
  source 1..21: mol_type = other RNA
ggggtaccctctgccacctcc

SEQ ID NO: 1666 - RNA, 21 nt, synthetic construct
  source 1..21: mol_type = other RNA
gggtaccccagcccagacaga

SEQ ID NO: 1667 - RNA, 21 nt, synthetic construct
  source 1..21: mol_type = other RNA
gggtaccctctgccacctcct

SEQ ID NO: 1668 - RNA, 21 nt, synthetic construct
  source 1..21: mol_type = other RNA
gggtccagcacctttggctca

SEQ ID NO: 1669 - RNA, 21 nt, synthetic construct
  source 1..21: mol_type = other RNA
ggtaccccagcccagacagag

SEQ ID NO: 1670 - RNA, 21 nt, synthetic construct
  source 1..21: mol_type = other RNA
ggtaccctctgccacctcctc

SEQ ID NO: 1671 - RNA, 21 nt, synthetic construct
  source 1..21: mol_type = other RNA
ggtaggagaaggtcttggcta

SEQ ID NO: 1672 - RNA, 21 nt, synthetic construct
  source 1..21: mol_type = other RNA
ggtccagcacctttggctcac

SEQ ID NO: 1673 - RNA, 21 nt, synthetic construct
  source 1..21: mol_type = other RNA
ggtctagaaggcagtggatga

SEQ ID NO: 1674 - RNA, 21 nt, synthetic construct
  source 1..21: mol_type = other RNA
ggtcttggctatgcacagcag

SEQ ID NO: 1675 - RNA, 21 nt, synthetic construct
  source 1..21: mol_type = other RNA
ggtgagtctgaggggggaggc

SEQ ID NO: 1676 - RNA, 21 nt, synthetic construct
  source 1..21: mol_type = other RNA
ggtgctggacccagaggagga

SEQ ID NO: 1677 - RNA, 21 nt, synthetic construct
  source 1..21: mol_type = other RNA
ggtggcagagggtaccccagc

SEQ ID NO: 1678 - RNA, 21 nt, synthetic construct
  source 1..21: mol_type = other RNA
gtaccccagcccagacagaga

SEQ ID NO: 1679 - RNA, 21 nt, synthetic construct
  source 1..21: mol_type = other RNA
gtaccctctgccacctcctcg

SEQ ID NO: 1680 - RNA, 21 nt, synthetic construct
  source 1..21: mol_type = other RNA
gtaggagaaggtcttggctat

SEQ ID NO: 1681 - RNA, 21 nt, synthetic construct
  source 1..21: mol_type = other RNA
gtcatgcagcccttgcctgct

SEQ ID NO: 1682 - RNA, 21 nt, synthetic construct
  source 1..21: mol_type = other RNA
gtccagcacctttggctcact

SEQ ID NO: 1683 - RNA, 21 nt, synthetic construct
  source 1..21: mol_type = other RNA
gtccctggaactgcccaagcc

SEQ ID NO: 1684 - RNA, 21 nt, synthetic construct
  source 1..21: mol_type = other RNA
gtccgctccacagccagcaaa

SEQ ID NO: 1685 - RNA, 21 nt, synthetic construct
  source 1..21: mol_type = other RNA
gtcctttgctggctgtggagc

SEQ ID NO: 1686 - RNA, 21 nt, synthetic construct
  source 1..21: mol_type = other RNA
gtctagaaggcagtggatgag

SEQ ID NO: 1687 - RNA, 21 nt, synthetic construct
  source 1..21: mol_type = other RNA
gtctgggctggggtaccctct

SEQ ID NO: 1688 - RNA, 21 nt, synthetic construct
  source 1..21: mol_type = other RNA
gtcttggctatgcacagcaga

SEQ ID NO: 1689 - RNA, 21 nt, synthetic construct
  source 1..21: mol_type = other RNA
gtgagccaaaggtgctggacc

SEQ ID NO: 1690 - RNA, 21 nt, synthetic construct
  source 1..21: mol_type = other RNA
gtgagtctgaggggggaggca

SEQ ID NO: 1691 - RNA, 21 nt, synthetic construct
  source 1..21: mol_type = other RNA
gtgcatagccaagaccttctc

SEQ ID NO: 1692 - RNA, 21 nt, synthetic construct
  source 1..21: mol_type = other RNA
gtgctggacccagaggaggat

SEQ ID NO: 1693 - RNA, 21 nt, synthetic construct
  source 1..21: mol_type = other RNA
gtggagcggactgggcagcgg

SEQ ID NO: 1694 - RNA, 21 nt, synthetic construct
  source 1..21: mol_type = other RNA
gtggcagagggtaccccagcc

SEQ ID NO: 1695 - RNA, 21 nt, synthetic construct
  source 1..21: mol_type = other RNA
gtgggccccgtccctggaact

SEQ ID NO: 1696 - RNA, 21 nt, synthetic construct
  source 1..21: mol_type = other RNA
gttccagggacggggcccaca

SEQ ID NO: 1697 - RNA, 21 nt, synthetic construct
  source 1..21: mol_type = other RNA
taccccagcccagacagagag

SEQ ID NO: 1698 - RNA, 21 nt, synthetic construct
  source 1..21: mol_type = other RNA
taccctctgccacctcctcga

SEQ ID NO: 1699 - RNA, 21 nt, synthetic construct
  source 1..21: mol_type = other RNA
taccttcgggaatctggtgag

SEQ ID NO: 1700 - RNA, 21 nt, synthetic construct
  source 1..21: mol_type = other RNA
tagaaggcagtggatgagcag

SEQ ID NO: 1701 - RNA, 21 nt, synthetic construct
  source 1..21: mol_type = other RNA
tagacctcgtcctttgctggc

SEQ ID NO: 1702 - RNA, 21 nt, synthetic construct
  source 1..21: mol_type = other RNA
tagccaagaccttctcctacc

SEQ ID NO: 1703 - RNA, 21 nt, synthetic construct
  source 1..21: mol_type = other RNA
taggagaaggtcttggctatg

SEQ ID NO: 1704 - RNA, 21 nt, synthetic construct
  source 1..21: mol_type = other RNA
tatgcacagcagatcctcctc

SEQ ID NO: 1705 - RNA, 21 nt, synthetic construct
  source 1..21: mol_type = other RNA
tcaccagattcccgaaggtag

SEQ ID NO: 1706 - RNA, 21 nt, synthetic construct
  source 1..21: mol_type = other RNA
tcactctctgtctgggctggg

SEQ ID NO: 1707 - RNA, 21 nt, synthetic construct
  source 1..21: mol_type = other RNA
tcactgctcatccactgcctt

SEQ ID NO: 1708 - RNA, 21 nt, synthetic construct
  source 1..21: mol_type = other RNA
tcagactcaccagattcccga

SEQ ID NO: 1709 - RNA, 21 nt, synthetic construct
  source 1..21: mol_type = other RNA
tcatccactgccttctagacc

SEQ ID NO: 1710 - RNA, 21 nt, synthetic construct
  source 1..21: mol_type = other RNA
tcatgcagcccttgcctgctg

SEQ ID NO: 1711 - RNA, 21 nt, synthetic construct
  source 1..21: mol_type = other RNA
tccacagccagcaaaggacga

SEQ ID NO: 1712 - RNA, 21 nt, synthetic construct
  source 1..21: mol_type = other RNA
tccactcactgctcatccact

SEQ ID NO: 1713 - RNA, 21 nt, synthetic construct
  source 1..21: mol_type = other RNA
tccactgccttctagacctcg

SEQ ID NO: 1714 - RNA, 21 nt, synthetic construct
  source 1..21: mol_type = other RNA
tccagcacctttggctcactc

SEQ ID NO: 1715 - RNA, 21 nt, synthetic construct
  source 1..21: mol_type = other RNA
tccagggacggggcccacagg

SEQ ID NO: 1716 - RNA, 21 nt, synthetic construct
  source 1..21: mol_type = other RNA
tcccccctcagactcaccaga

SEQ ID NO: 1717 - RNA, 21 nt, synthetic construct
  source 1..21: mol_type = other RNA
tcccgaaggtaggagaaggtc

SEQ ID NO: 1718 - RNA, 21 nt, synthetic construct
  source 1..21: mol_type = other RNA
tccctggaactgcccaagcca

SEQ ID NO: 1719 - RNA, 21 nt, synthetic construct
  source 1..21: mol_type = other RNA
tccgctccacagccagcaaag

SEQ ID NO: 1720 - RNA, 21 nt, synthetic construct
  source 1..21: mol_type = other RNA
tcctaccttcgggaatctggt

SEQ ID NO: 1721 - RNA, 21 nt, synthetic construct
  source 1..21: mol_type = other RNA
tcctcctctgggtccagcacc

SEQ ID NO: 1722 - RNA, 21 nt, synthetic construct
  source 1..21: mol_type = other RNA
tcctcgaggaaggccccagca

SEQ ID NO: 1723 - RNA, 21 nt, synthetic construct
  source 1..21: mol_type = other RNA
tcctcgaggaggtggcagagg

SEQ ID NO: 1724 - RNA, 21 nt, synthetic construct
  source 1..21: mol_type = other RNA
tcctctgggtccagcaccttt

SEQ ID NO: 1725 - RNA, 21 nt, synthetic construct
  source 1..21: mol_type = other RNA
tcctttgctggctgtggagcg

SEQ ID NO: 1726 - RNA, 21 nt, synthetic construct
  source 1..21: mol_type = other RNA
tcgaggaaggccccagcaggc

SEQ ID NO: 1727 - RNA, 21 nt, synthetic construct
  source 1..21: mol_type = other RNA
tcgaggaggtggcagagggta

SEQ ID NO: 1728 - RNA, 21 nt, synthetic construct
  source 1..21: mol_type = other RNA
tcgggaatctggtgagtctga

SEQ ID NO: 1729 - RNA, 21 nt, synthetic construct
  source 1..21: mol_type = other RNA
tcgtcctttgctggctgtgga

SEQ ID NO: 1730 - RNA, 21 nt, synthetic construct
  source 1..21: mol_type = other RNA
tctagaaggcagtggatgagc

SEQ ID NO: 1731 - RNA, 21 nt, synthetic construct
  source 1..21: mol_type = other RNA
tctagacctcgtcctttgctg

SEQ ID NO: 1732 - RNA, 21 nt, synthetic construct
  source 1..21: mol_type = other RNA
tctcctaccttcgggaatctg

SEQ ID NO: 1733 - RNA, 21 nt, synthetic construct
  source 1..21: mol_type = other RNA
tctctgtctgggctggggtac

SEQ ID NO: 1734 - RNA, 21 nt, synthetic construct
  source 1..21: mol_type = other RNA
tctgccacctcctcgaggaag

SEQ ID NO: 1735 - RNA, 21 nt, synthetic construct
  source 1..21: mol_type = other RNA
tctgctgtgcatagccaagac

SEQ ID NO: 1736 - RNA, 21 nt, synthetic construct
  source 1..21: mol_type = other RNA
tctgggctggggtaccctctg

SEQ ID NO: 1737 - RNA, 21 nt, synthetic construct
  source 1..21: mol_type = other RNA
tctgggtccagcacctttggc

SEQ ID NO: 1738 - RNA, 21 nt, synthetic construct
  source 1..21: mol_type = other RNA
tctggtgagtctgagggggga

SEQ ID NO: 1739 - RNA, 21 nt, synthetic construct
  source 1..21: mol_type = other RNA
tctgtctgggctggggtaccc

SEQ ID NO: 1740 - RNA, 21 nt, synthetic construct
  source 1..21: mol_type = other RNA
tcttggctatgcacagcagat

SEQ ID NO: 1741 - RNA, 21 nt, synthetic construct
  source 1..21: mol_type = other RNA
tgactggcttgggcagttcca

SEQ ID NO: 1742 - RNA, 21 nt, synthetic construct
  source 1..21: mol_type = other RNA
tgagccaaaggtgctggaccc

SEQ ID NO: 1743 - RNA, 21 nt, synthetic construct
  source 1..21: mol_type = other RNA
tgagtctgaggggggaggcag

SEQ ID NO: 1744 - RNA, 21 nt, synthetic construct
  source 1..21: mol_type = other RNA
tgcacagcagatcctcctctg

SEQ ID NO: 1745 - RNA, 21 nt, synthetic construct
  source 1..21: mol_type = other RNA
tgcagcccttgcctgctgggg

SEQ ID NO: 1746 - RNA, 21 nt, synthetic construct
  source 1..21: mol_type = other RNA
tgcatagccaagaccttctcc

SEQ ID NO: 1747 - RNA, 21 nt, synthetic construct
  source 1..21: mol_type = other RNA
tgcatgactggcttgggcagt

SEQ ID NO: 1748 - RNA, 21 nt, synthetic construct
  source 1..21: mol_type = other RNA
tgccacctcctcgaggaaggc

SEQ ID NO: 1749 - RNA, 21 nt, synthetic construct
  source 1..21: mol_type = other RNA
tgcccaagccagtcatgcagc

SEQ ID NO: 1750 - RNA, 21 nt, synthetic construct
  source 1..21: mol_type = other RNA
tgcccagtccgctccacagcc

SEQ ID NO: 1751 - RNA, 21 nt, synthetic construct
  source 1..21: mol_type = other RNA
tgcctcccccctcagactcac

SEQ ID NO: 1752 - RNA, 21 nt, synthetic construct
  source 1..21: mol_type = other RNA
tgcctgctggggccttcctcg

SEQ ID NO: 1753 - RNA, 21 nt, synthetic construct
  source 1..21: mol_type = other RNA
tgccttctagacctcgtcctt

SEQ ID NO: 1754 - RNA, 21 nt, synthetic construct
  source 1..21: mol_type = other RNA
tgctcatccactgccttctag

SEQ ID NO: 1755 - RNA, 21 nt, synthetic construct
  source 1..21: mol_type = other RNA
tgctggacccagaggaggatc

SEQ ID NO: 1756 - RNA, 21 nt, synthetic construct
  source 1..21: mol_type = other RNA
tgctggctgtggagcggactg

SEQ ID NO: 1757 - RNA, 21 nt, synthetic construct
  source 1..21: mol_type = other RNA
tgctggggccttcctcgagga

SEQ ID NO: 1758 - RNA, 21 nt, synthetic construct
  source 1..21: mol_type = other RNA
tgctgtgcatagccaagacct

SEQ ID NO: 1759 - RNA, 21 nt, synthetic construct
  source 1..21: mol_type = other RNA
tggaactgcccaagccagtca

SEQ ID NO: 1760 - RNA, 21 nt, synthetic construct
  source 1..21: mol_type = other RNA
tggacccagaggaggatctgc

SEQ ID NO: 1761 - RNA, 21 nt, synthetic construct
  source 1..21: mol_type = other RNA
tggagcggactgggcagcggc

SEQ ID NO: 1762 - RNA, 21 nt, synthetic construct
  source 1..21: mol_type = other RNA
tggcagagggtaccccagccc

SEQ ID NO: 1763 - RNA, 21 nt, synthetic construct
  source 1..21: mol_type = other RNA
tggctatgcacagcagatcct

SEQ ID NO: 1764 - RNA, 21 nt, synthetic construct
  source 1..21: mol_type = other RNA
tggctcactctctgtctgggc

SEQ ID NO: 1765 - RNA, 21 nt, synthetic construct
  source 1..21: mol_type = other RNA
tggctgtggagcggactgggc

SEQ ID NO: 1766 - RNA, 21 nt, synthetic construct
  source 1..21: mol_type = other RNA
tggcttgggcagttccaggga

SEQ ID NO: 1767 - RNA, 21 nt, synthetic construct
  source 1..21: mol_type = other RNA
tgggcagttccagggacgggg

SEQ ID NO: 1768 - RNA, 21 nt, synthetic construct
  source 1..21: mol_type = other RNA
tgggccccgtccctggaactg

SEQ ID NO: 1769 - RNA, 21 nt, synthetic construct
  source 1..21: mol_type = other RNA
tgggctggggtaccctctgcc

SEQ ID NO: 1770 - RNA, 21 nt, synthetic construct
  source 1..21: mol_type = other RNA
tggggccttcctcgaggaggt

SEQ ID NO: 1771 - RNA, 21 nt, synthetic construct
  source 1..21: mol_type = other RNA
tggggtaccctctgccacctc

SEQ ID NO: 1772 - RNA, 21 nt, synthetic construct
  source 1..21: mol_type = other RNA
tgggtccagcacctttggctc

SEQ ID NO: 1773 - RNA, 21 nt, synthetic construct
  source 1..21: mol_type = other RNA
tggtgagtctgaggggggagg

SEQ ID NO: 1774 - RNA, 21 nt, synthetic construct
  source 1..21: mol_type = other RNA
tgtctgggctggggtaccctc

SEQ ID NO: 1775 - RNA, 21 nt, synthetic construct
  source 1..21: mol_type = other RNA
tgtgcatagccaagaccttct

SEQ ID NO: 1776 - RNA, 21 nt, synthetic construct
  source 1..21: mol_type = other RNA
tgtggagcggactgggcagcg

SEQ ID NO: 1777 - RNA, 21 nt, synthetic construct
  source 1..21: mol_type = other RNA
tgtgggccccgtccctggaac

SEQ ID NO: 1778 - RNA, 21 nt, synthetic construct
  source 1..21: mol_type = other RNA
ttccagggacggggcccacag

SEQ ID NO: 1779 - RNA, 21 nt, synthetic construct
  source 1..21: mol_type = other RNA
ttcccgaaggtaggagaaggt

SEQ ID NO: 1780 - RNA, 21 nt, synthetic construct
  source 1..21: mol_type = other RNA
ttcctcgaggaggtggcagag

SEQ ID NO: 1781 - RNA, 21 nt, synthetic construct
  source 1..21: mol_type = other RNA
ttcgggaatctggtgagtctg

SEQ ID NO: 1782 - RNA, 21 nt, synthetic construct
  source 1..21: mol_type = other RNA
ttctagacctcgtcctttgct

SEQ ID NO: 1783 - RNA, 21 nt, synthetic construct
  source 1..21: mol_type = other RNA
ttctcctaccttcgggaatct

SEQ ID NO: 1784 - RNA, 21 nt, synthetic construct
  source 1..21: mol_type = other RNA
ttgcctgctggggccttcctc

SEQ ID NO: 1785 - RNA, 21 nt, synthetic construct
  source 1..21: mol_type = other RNA
ttgctggctgtggagcggact

SEQ ID NO: 1786 - RNA, 21 nt, synthetic construct
  source 1..21: mol_type = other RNA
ttggctatgcacagcagatcc

SEQ ID NO: 1787 - RNA, 21 nt, synthetic construct
  source 1..21: mol_type = other RNA
ttggctcactctctgtctggg

SEQ ID NO: 1788 - RNA, 21 nt, synthetic construct
  source 1..21: mol_type = other RNA
ttgggcagttccagggacggg

SEQ ID NO: 1789 - RNA, 21 nt, synthetic construct
  source 1..21: mol_type = other RNA
tttgctggctgtggagcggac

SEQ ID NO: 1790 - RNA, 21 nt, synthetic construct
  source 1..21: mol_type = other RNA
tttggctcactctctgtctgg

SEQ ID NO: 1791 - RNA, 22 nt, synthetic construct
  source 1..22: mol_type = other RNA
aaaaggcctgcctcccccctca

SEQ ID NO: 1792 - RNA, 22 nt, synthetic construct
  source 1..22: mol_type = other RNA
aaaggacgaggtctagaaggca

SEQ ID NO: 1793 - RNA, 22 nt, synthetic construct
  source 1..22: mol_type = other RNA
aaaggcctgcctcccccctcag

SEQ ID NO: 1794 - RNA, 22 nt, synthetic construct
  source 1..22: mol_type = other RNA
aaaggtgctggacccagaggag

SEQ ID NO: 1795 - RNA, 22 nt, synthetic construct
  source 1..22: mol_type = other RNA
aactgcccaagccagtcatgca

SEQ ID NO: 1796 - RNA, 22 nt, synthetic construct
  source 1..22: mol_type = other RNA
aagaccttctcctaccttcggg

SEQ ID NO: 1797 - RNA, 22 nt, synthetic construct
  source 1..22: mol_type = other RNA
aagccagtcatgcagcccttgc

SEQ ID NO: 1798 - RNA, 22 nt, synthetic construct
  source 1..22: mol_type = other RNA
aaggacgaggtctagaaggcag

SEQ ID NO: 1799 - RNA, 22 nt, synthetic construct
  source 1..22: mol_type = other RNA
aaggccccagcaggcaagggct

SEQ ID NO: 1800 - RNA, 22 nt, synthetic construct
  source 1..22: mol_type = other RNA
aaggcctgcctcccccctcaga

SEQ ID NO: 1801 - RNA, 22 nt, synthetic construct
  source 1..22: mol_type = other RNA
aagggctgcatgactggcttgg

SEQ ID NO: 1802 - RNA, 22 nt, synthetic construct
  source 1..22: mol_type = other RNA
aaggtaggagaaggtcttggct

SEQ ID NO: 1803 - RNA, 22 nt, synthetic construct
  source 1..22: mol_type = other RNA
aaggtcttggctatgcacagca

SEQ ID NO: 1804 - RNA, 22 nt, synthetic construct
  source 1..22: mol_type = other RNA
aaggtgctggacccagaggagg

SEQ ID NO: 1805 - RNA, 22 nt, synthetic construct
  source 1..22: mol_type = other RNA
aatctggtgagtctgagggggg

SEQ ID NO: 1806 - RNA, 22 nt, synthetic construct
  source 1..22: mol_type = other RNA
acagagagtgagccaaaggtgc

SEQ ID NO: 1807 - RNA, 22 nt, synthetic construct
  source 1..22: mol_type = other RNA
acagcagatcctcctctgggtc

SEQ ID NO: 1808 - RNA, 22 nt, synthetic construct
  source 1..22: mol_type = other RNA
acagccagcaaaggacgaggtc

SEQ ID NO: 1809 - RNA, 22 nt, synthetic construct
  source 1..22: mol_type = other RNA
acaggggccgctgcccagtccg

SEQ ID NO: 1810 - RNA, 22 nt, synthetic construct
  source 1..22: mol_type = other RNA
accagattcccgaaggtaggag

SEQ ID NO: 1811 - RNA, 22 nt, synthetic construct
  source 1..22: mol_type = other RNA
acccagaggaggatctgctgtg

SEQ ID NO: 1812 - RNA, 22 nt, synthetic construct
  source 1..22: mol_type = other RNA
accccagcccagacagagagtg

SEQ ID NO: 1813 - RNA, 22 nt, synthetic construct
  source 1..22: mol_type = other RNA
accctctgccacctcctcgagg

SEQ ID NO: 1814 - RNA, 22 nt, synthetic construct
  source 1..22: mol_type = other RNA
acctcctcgaggaaggccccag

SEQ ID NO: 1815 - RNA, 22 nt, synthetic construct
  source 1..22: mol_type = other RNA
acctcgtcctttgctggctgtg

SEQ ID NO: 1816 - RNA, 22 nt, synthetic construct
  source 1..22: mol_type = other RNA
accttcgggaatctggtgagtc

SEQ ID NO: 1817 - RNA, 22 nt, synthetic construct
  source 1..22: mol_type = other RNA
accttctcctaccttcgggaat

SEQ ID NO: 1818 - RNA, 22 nt, synthetic construct
  source 1..22: mol_type = other RNA
acctttggctcactctctgtct

SEQ ID NO: 1819 - RNA, 22 nt, synthetic construct
  source 1..22: mol_type = other RNA
acgaggtctagaaggcagtgga

SEQ ID NO: 1820 - RNA, 22 nt, synthetic construct
  source 1..22: mol_type = other RNA
actcaccagattcccgaaggta

SEQ ID NO: 1821 - RNA, 22 nt, synthetic construct
  source 1..22: mol_type = other RNA
actcactgctcatccactgcct

SEQ ID NO: 1822 - RNA, 22 nt, synthetic construct
  source 1..22: mol_type = other RNA
actctctgtctgggctggggta

SEQ ID NO: 1823 - RNA, 22 nt, synthetic construct
  source 1..22: mol_type = other RNA
actgcccaagccagtcatgcag

SEQ ID NO: 1824 - RNA, 22 nt, synthetic construct
  source 1..22: mol_type = other RNA
actgccttctagacctcgtcct

SEQ ID NO: 1825 - RNA, 22 nt, synthetic construct
  source 1..22: mol_type = other RNA
actgctcatccactgccttcta

SEQ ID NO: 1826 - RNA, 22 nt, synthetic construct
  source 1..22: mol_type = other RNA
actggcttgggcagttccaggg

SEQ ID NO: 1827 - RNA, 22 nt, synthetic construct
  source 1..22: mol_type = other RNA
actgggcagcggcccctgtggg

SEQ ID NO: 1828 - RNA, 22 nt, synthetic construct
  source 1..22: mol_type = other RNA
agaaggtcttggctatgcacag

SEQ ID NO: 1829 - RNA, 22 nt, synthetic construct
  source 1..22: mol_type = other RNA
agacagagagtgagccaaaggt

SEQ ID NO: 1830 - RNA, 22 nt, synthetic construct
  source 1..22: mol_type = other RNA
agacctcgtcctttgctggctg

SEQ ID NO: 1831 - RNA, 22 nt, synthetic construct
  source 1..22: mol_type = other RNA
agaccttctcctaccttcggga

SEQ ID NO: 1832 - RNA, 22 nt, synthetic construct
  source 1..22: mol_type = other RNA
agactcaccagattcccgaagg

SEQ ID NO: 1833 - RNA, 22 nt, synthetic construct
  source 1..22: mol_type = other RNA
agagagtgagccaaaggtgctg

SEQ ID NO: 1834 - RNA, 22 nt, synthetic construct
  source 1..22: mol_type = other RNA
agaggaggatctgctgtgcata

SEQ ID NO: 1835 - RNA, 22 nt, synthetic construct
  source 1..22: mol_type = other RNA
agagggtaccccagcccagaca

SEQ ID NO: 1836 - RNA, 22 nt, synthetic construct
  source 1..22: mol_type = other RNA
agagtgagccaaaggtgctgga

SEQ ID NO: 1837 - RNA, 22 nt, synthetic construct
  source 1..22: mol_type = other RNA
agatcctcctctgggtccagca

SEQ ID NO: 1838 - RNA, 22 nt, synthetic construct
  source 1..22: mol_type = other RNA
agattcccgaaggtaggagaag

SEQ ID NO: 1839 - RNA, 22 nt, synthetic construct
  source 1..22: mol_type = other RNA
agcaaaggacgaggtctagaag

SEQ ID NO: 1840 - RNA, 22 nt, synthetic construct
  source 1..22: mol_type = other RNA
agcacctttggctcactctctg

SEQ ID NO: 1841 - RNA, 22 nt, synthetic construct
  source 1..22: mol_type = other RNA
agcagatcctcctctgggtcca

SEQ ID NO: 1842 - RNA, 22 nt, synthetic construct
  source 1..22: mol_type = other RNA
agcaggcaagggctgcatgact

SEQ ID NO: 1843 - RNA, 22 nt, synthetic construct
  source 1..22: mol_type = other RNA
agccaaaggtgctggacccaga

SEQ ID NO: 1844 - RNA, 22 nt, synthetic construct
  source 1..22: mol_type = other RNA
agccaagaccttctcctacctt

SEQ ID NO: 1845 - RNA, 22 nt, synthetic construct
  source 1..22: mol_type = other RNA
agccagcaaaggacgaggtcta

SEQ ID NO: 1846 - RNA, 22 nt, synthetic construct
  source 1..22: mol_type = other RNA
agccagtcatgcagcccttgcc

SEQ ID NO: 1847 - RNA, 22 nt, synthetic construct
  source 1..22: mol_type = other RNA
agcccagacagagagtgagcca

SEQ ID NO: 1848 - RNA, 22 nt, synthetic construct
  source 1..22: mol_type = other RNA
agcccttgcctgctggggcctt

SEQ ID NO: 1849 - RNA, 22 nt, synthetic construct
  source 1..22: mol_type = other RNA
agcggactgggcagcggcccct

SEQ ID NO: 1850 - RNA, 22 nt, synthetic construct
  source 1..22: mol_type = other RNA
aggaaaaggcctgcctcccccc

SEQ ID NO: 1851 - RNA, 22 nt, synthetic construct
  source 1..22: mol_type = other RNA
aggaaggccccagcaggcaagg

SEQ ID NO: 1852 - RNA, 22 nt, synthetic construct
  source 1..22: mol_type = other RNA
aggacgaggtctagaaggcagt

SEQ ID NO: 1853 - RNA, 22 nt, synthetic construct
  source 1..22: mol_type = other RNA
aggagaaggtcttggctatgca

SEQ ID NO: 1854 - RNA, 22 nt, synthetic construct
  source 1..22: mol_type = other RNA
aggaggatctgctgtgcatagc

SEQ ID NO: 1855 - RNA, 22 nt, synthetic construct
  source 1..22: mol_type = other RNA
aggaggtggcagagggtacccc

SEQ ID NO: 1856 - RNA, 22 nt, synthetic construct
  source 1..22: mol_type = other RNA
aggatctgctgtgcatagccaa

SEQ ID NO: 1857 - RNA, 22 nt, synthetic construct
  source 1..22: mol_type = other RNA
aggcaagggctgcatgactggc

SEQ ID NO: 1858 - RNA, 22 nt, synthetic construct
  source 1..22: mol_type = other RNA
aggccccagcaggcaagggctg

SEQ ID NO: 1859 - RNA, 22 nt, synthetic construct
  source 1..22: mol_type = other RNA
aggcctgcctcccccctcagac

SEQ ID NO: 1860 - RNA, 22 nt, synthetic construct
  source 1..22: mol_type = other RNA
agggctgcatgactggcttggg

SEQ ID NO: 1861 - RNA, 22 nt, synthetic construct
  source 1..22: mol_type = other RNA
aggggccgctgcccagtccgct

SEQ ID NO: 1862 - RNA, 22 nt, synthetic construct
  source 1..22: mol_type = other RNA
agggtaccccagcccagacaga

SEQ ID NO: 1863 - RNA, 22 nt, synthetic construct
  source 1..22: mol_type = other RNA
aggtaggagaaggtcttggcta

SEQ ID NO: 1864 - RNA, 22 nt, synthetic construct
  source 1..22: mol_type = other RNA
aggtctagaaggcagtggatga

SEQ ID NO: 1865 - RNA, 22 nt, synthetic construct
  source 1..22: mol_type = other RNA
aggtcttggctatgcacagcag

SEQ ID NO: 1866 - RNA, 22 nt, synthetic construct
  source 1..22: mol_type = other RNA
aggtgctggacccagaggagga

SEQ ID NO: 1867 - RNA, 22 nt, synthetic construct
  source 1..22: mol_type = other RNA
aggtggcagagggtaccccagc

SEQ ID NO: 1868 - RNA, 22 nt, synthetic construct
  source 1..22: mol_type = other RNA
agtcatgcagcccttgcctgct

SEQ ID NO: 1869 - RNA, 22 nt, synthetic construct
  source 1..22: mol_type = other RNA
agtccgctccacagccagcaaa

SEQ ID NO: 1870 - RNA, 22 nt, synthetic construct
  source 1..22: mol_type = other RNA
agtgagccaaaggtgctggacc

SEQ ID NO: 1871 - RNA, 22 nt, synthetic construct
  source 1..22: mol_type = other RNA
agttccagggacggggcccaca

SEQ ID NO: 1872 - RNA, 22 nt, synthetic construct
  source 1..22: mol_type = other RNA
atagccaagaccttctcctacc

SEQ ID NO: 1873 - RNA, 22 nt, synthetic construct
  source 1..22: mol_type = other RNA
atccactgccttctagacctcg

SEQ ID NO: 1874 - RNA, 22 nt, synthetic construct
  source 1..22: mol_type = other RNA
atcctcctctgggtccagcacc

SEQ ID NO: 1875 - RNA, 22 nt, synthetic construct
  source 1..22: mol_type = other RNA
atctgctgtgcatagccaagac

SEQ ID NO: 1876 - RNA, 22 nt, synthetic construct
  source 1..22: mol_type = other RNA
atctggtgagtctgagggggga

SEQ ID NO: 1877 - RNA, 22 nt, synthetic construct
  source 1..22: mol_type = other RNA
atgactggcttgggcagttcca

SEQ ID NO: 1878 - RNA, 22 nt, synthetic construct
  source 1..22: mol_type = other RNA
atgcacagcagatcctcctctg

SEQ ID NO: 1879 - RNA, 22 nt, synthetic construct
  source 1..22: mol_type = other RNA
atgcagcccttgcctgctgggg

SEQ ID NO: 1880 - RNA, 22 nt, synthetic construct
  source 1..22: mol_type = other RNA
attcccgaaggtaggagaaggt

SEQ ID NO: 1881 - RNA, 22 nt, synthetic construct
  source 1..22: mol_type = other RNA
caaaggacgaggtctagaaggc

SEQ ID NO: 1882 - RNA, 22 nt, synthetic construct
  source 1..22: mol_type = other RNA
caaaggtgctggacccagagga

SEQ ID NO: 1883 - RNA, 22 nt, synthetic construct
  source 1..22: mol_type = other RNA
caagaccttctcctaccttcgg

SEQ ID NO: 1884 - RNA, 22 nt, synthetic construct
  source 1..22: mol_type = other RNA
caagccagtcatgcagcccttg

SEQ ID NO: 1885 - RNA, 22 nt, synthetic construct
  source 1..22: mol_type = other RNA
caagggctgcatgactggcttg

SEQ ID NO: 1886 - RNA, 22 nt, synthetic construct
  source 1..22: mol_type = other RNA
cacagcagatcctcctctgggt

SEQ ID NO: 1887 - RNA, 22 nt, synthetic construct
  source 1..22: mol_type = other RNA
cacagccagcaaaggacgaggt

SEQ ID NO: 1888 - RNA, 22 nt, synthetic construct
  source 1..22: mol_type = other RNA
cacaggggccgctgcccagtcc

SEQ ID NO: 1889 - RNA, 22 nt, synthetic construct
  source 1..22: mol_type = other RNA
caccagattcccgaaggtagga

SEQ ID NO: 1890 - RNA, 22 nt, synthetic construct
  source 1..22: mol_type = other RNA
cacctcctcgaggaaggcccca

SEQ ID NO: 1891 - RNA, 22 nt, synthetic construct
  source 1..22: mol_type = other RNA
cacctttggctcactctctgtc

SEQ ID NO: 1892 - RNA, 22 nt, synthetic construct
  source 1..22: mol_type = other RNA
cactcactgctcatccactgcc

SEQ ID NO: 1893 - RNA, 22 nt, synthetic construct
  source 1..22: mol_type = other RNA
cactctctgtctgggctggggt

SEQ ID NO: 1894 - RNA, 22 nt, synthetic construct
  source 1..22: mol_type = other RNA
cactgccttctagacctcgtcc

SEQ ID NO: 1895 - RNA, 22 nt, synthetic construct
  source 1..22: mol_type = other RNA
cactgctcatccactgccttct

SEQ ID NO: 1896 - RNA, 22 nt, synthetic construct
  source 1..22: mol_type = other RNA
cagacagagagtgagccaaagg

SEQ ID NO: 1897 - RNA, 22 nt, synthetic construct
  source 1..22: mol_type = other RNA
cagactcaccagattcccgaag

SEQ ID NO: 1898 - RNA, 22 nt, synthetic construct
  source 1..22: mol_type = other RNA
cagagagtgagccaaaggtgct

SEQ ID NO: 1899 - RNA, 22 nt, synthetic construct
  source 1..22: mol_type = other RNA
cagaggaggatctgctgtgcat

SEQ ID NO: 1900 - RNA, 22 nt, synthetic construct
  source 1..22: mol_type = other RNA
cagagggtaccccagcccagac

SEQ ID NO: 1901 - RNA, 22 nt, synthetic construct
  source 1..22: mol_type = other RNA
cagatcctcctctgggtccagc

SEQ ID NO: 1902 - RNA, 22 nt, synthetic construct
  source 1..22: mol_type = other RNA
cagattcccgaaggtaggagaa

SEQ ID NO: 1903 - RNA, 22 nt, synthetic construct
  source 1..22: mol_type = other RNA
cagcaaaggacgaggtctagaa

SEQ ID NO: 1904 - RNA, 22 nt, synthetic construct
  source 1..22: mol_type = other RNA
cagcacctttggctcactctct

SEQ ID NO: 1905 - RNA, 22 nt, synthetic construct
  source 1..22: mol_type = other RNA
cagcagatcctcctctgggtcc

SEQ ID NO: 1906 - RNA, 22 nt, synthetic construct
  source 1..22: mol_type = other RNA
cagcaggcaagggctgcatgac

SEQ ID NO: 1907 - RNA, 22 nt, synthetic construct
  source 1..22: mol_type = other RNA
cagccagcaaaggacgaggtct

SEQ ID NO: 1908 - RNA, 22 nt, synthetic construct
  source 1..22: mol_type = other RNA
cagcccagacagagagtgagcc

SEQ ID NO: 1909 - RNA, 22 nt, synthetic construct
  source 1..22: mol_type = other RNA
cagcccttgcctgctggggcct

SEQ ID NO: 1910 - RNA, 22 nt, synthetic construct
  source 1..22: mol_type = other RNA
caggcaagggctgcatgactgg

SEQ ID NO: 1911 - RNA, 22 nt, synthetic construct
  source 1..22: mol_type = other RNA
cagtcatgcagcccttgcctgc

SEQ ID NO: 1912 - RNA, 22 nt, synthetic construct
  source 1..22: mol_type = other RNA
cagtccgctccacagccagcaa

SEQ ID NO: 1913 - RNA, 22 nt, synthetic construct
  source 1..22: mol_type = other RNA
cagttccagggacggggcccac

SEQ ID NO: 1914 - RNA, 22 nt, synthetic construct
  source 1..22: mol_type = other RNA
catagccaagaccttctcctac

SEQ ID NO: 1915 - RNA, 22 nt, synthetic construct
  source 1..22: mol_type = other RNA
catccactgccttctagacctc

SEQ ID NO: 1916 - RNA, 22 nt, synthetic construct
  source 1..22: mol_type = other RNA
catgactggcttgggcagttcc

SEQ ID NO: 1917 - RNA, 22 nt, synthetic construct
  source 1..22: mol_type = other RNA
catgcagcccttgcctgctggg

SEQ ID NO: 1918 - RNA, 22 nt, synthetic construct
  source 1..22: mol_type = other RNA
ccaaaggtgctggacccagagg

SEQ ID NO: 1919 - RNA, 22 nt, synthetic construct
  source 1..22: mol_type = other RNA
ccaagaccttctcctaccttcg

SEQ ID NO: 1920 - RNA, 22 nt, synthetic construct
  source 1..22: mol_type = other RNA
ccaagccagtcatgcagccctt

SEQ ID NO: 1921 - RNA, 22 nt, synthetic construct
  source 1..22: mol_type = other RNA
ccacagccagcaaaggacgagg

SEQ ID NO: 1922 - RNA, 22 nt, synthetic construct
  source 1..22: mol_type = other RNA
ccacaggggccgctgcccagtc

SEQ ID NO: 1923 - RNA, 22 nt, synthetic construct
  source 1..22: mol_type = other RNA
ccacctcctcgaggaaggcccc

SEQ ID NO: 1924 - RNA, 22 nt, synthetic construct
  source 1..22: mol_type = other RNA
ccactcactgctcatccactgc

SEQ ID NO: 1925 - RNA, 22 nt, synthetic construct
  source 1..22: mol_type = other RNA
ccactgccttctagacctcgtc

SEQ ID NO: 1926 - RNA, 22 nt, synthetic construct
  source 1..22: mol_type = other RNA
ccagacagagagtgagccaaag

SEQ ID NO: 1927 - RNA, 22 nt, synthetic construct
  source 1..22: mol_type = other RNA
ccagaggaggatctgctgtgca

SEQ ID NO: 1928 - RNA, 22 nt, synthetic construct
  source 1..22: mol_type = other RNA
ccagattcccgaaggtaggaga

SEQ ID NO: 1929 - RNA, 22 nt, synthetic construct
  source 1..22: mol_type = other RNA
ccagcaaaggacgaggtctaga

SEQ ID NO: 1930 - RNA, 22 nt, synthetic construct
  source 1..22: mol_type = other RNA
ccagcacctttggctcactctc

SEQ ID NO: 1931 - RNA, 22 nt, synthetic construct
  source 1..22: mol_type = other RNA
ccagcaggcaagggctgcatga

SEQ ID NO: 1932 - RNA, 22 nt, synthetic construct
  source 1..22: mol_type = other RNA
ccagcccagacagagagtgagc

SEQ ID NO: 1933 - RNA, 22 nt, synthetic construct
  source 1..22: mol_type = other RNA
ccagtcatgcagcccttgcctg

SEQ ID NO: 1934 - RNA, 22 nt, synthetic construct
  source 1..22: mol_type = other RNA
ccagtccgctccacagccagca

SEQ ID NO: 1935 - RNA, 22 nt, synthetic construct
  source 1..22: mol_type = other RNA
cccaagccagtcatgcagccct

SEQ ID NO: 1936 - RNA, 22 nt, synthetic construct
  source 1..22: mol_type = other RNA
cccacaggggccgctgcccagt

SEQ ID NO: 1937 - RNA, 22 nt, synthetic construct
  source 1..22: mol_type = other RNA
cccagacagagagtgagccaaa

SEQ ID NO: 1938 - RNA, 22 nt, synthetic construct
  source 1..22: mol_type = other RNA
cccagaggaggatctgctgtgc

SEQ ID NO: 1939 - RNA, 22 nt, synthetic construct
  source 1..22: mol_type = other RNA
cccagcaggcaagggctgcatg

SEQ ID NO: 1940 - RNA, 22 nt, synthetic construct
  source 1..22: mol_type = other RNA
cccagcccagacagagagtgag

SEQ ID NO: 1941 - RNA, 22 nt, synthetic construct
  source 1..22: mol_type = other RNA
cccagtccgctccacagccagc

SEQ ID NO: 1942 - RNA, 22 nt, synthetic construct
  source 1..22: mol_type = other RNA
ccccagcaggcaagggctgcat

SEQ ID NO: 1943 - RNA, 22 nt, synthetic construct
  source 1..22: mol_type = other RNA
ccccagcccagacagagagtga

SEQ ID NO: 1944 - RNA, 22 nt, synthetic construct
  source 1..22: mol_type = other RNA
cccccctcagactcaccagatt

SEQ ID NO: 1945 - RNA, 22 nt, synthetic construct
  source 1..22: mol_type = other RNA
ccccctcagactcaccagattc

SEQ ID NO: 1946 - RNA, 22 nt, synthetic construct
  source 1..22: mol_type = other RNA
ccccgtccctggaactgcccaa

SEQ ID NO: 1947 - RNA, 22 nt, synthetic construct
  source 1..22: mol_type = other RNA
cccctcagactcaccagattcc

SEQ ID NO: 1948 - RNA, 22 nt, synthetic construct
  source 1..22: mol_type = other RNA
cccgaaggtaggagaaggtctt

SEQ ID NO: 1949 - RNA, 22 nt, synthetic construct
  source 1..22: mol_type = other RNA
cccgtccctggaactgcccaag

SEQ ID NO: 1950 - RNA, 22 nt, synthetic construct
  source 1..22: mol_type = other RNA
ccctcagactcaccagattccc

SEQ ID NO: 1951 - RNA, 22 nt, synthetic construct
  source 1..22: mol_type = other RNA
ccctctgccacctcctcgagga

SEQ ID NO: 1952 - RNA, 22 nt, synthetic construct
  source 1..22: mol_type = other RNA
ccctggaactgcccaagccagt

SEQ ID NO: 1953 - RNA, 22 nt, synthetic construct
  source 1..22: mol_type = other RNA
ccctgtgggccccgtccctgga

SEQ ID NO: 1954 - RNA, 22 nt, synthetic construct
  source 1..22: mol_type = other RNA
cccttgcctgctggggccttcc

SEQ ID NO: 1955 - RNA, 22 nt, synthetic construct
  source 1..22: mol_type = other RNA
ccgaaggtaggagaaggtcttg

SEQ ID NO: 1956 - RNA, 22 nt, synthetic construct
  source 1..22: mol_type = other RNA
ccgctccacagccagcaaagga

SEQ ID NO: 1957 - RNA, 22 nt, synthetic construct
  source 1..22: mol_type = other RNA
ccgctgcccagtccgctccaca

SEQ ID NO: 1958 - RNA, 22 nt, synthetic construct
  source 1..22: mol_type = other RNA
ccgtccctggaactgcccaagc

SEQ ID NO: 1959 - RNA, 22 nt, synthetic construct
  source 1..22: mol_type = other RNA
cctaccttcgggaatctggtga

SEQ ID NO: 1960 - RNA, 22 nt, synthetic construct
  source 1..22: mol_type = other RNA
cctcagactcaccagattcccg

SEQ ID NO: 1961 - RNA, 22 nt, synthetic construct
  source 1..22: mol_type = other RNA
cctcccccctcagactcaccag

SEQ ID NO: 1962 - RNA, 22 nt, synthetic construct
  source 1..22: mol_type = other RNA
cctcctcgaggaaggccccagc

SEQ ID NO: 1963 - RNA, 22 nt, synthetic construct
  source 1..22: mol_type = other RNA
cctcctctgggtccagcacctt

SEQ ID NO: 1964 - RNA, 22 nt, synthetic construct
  source 1..22: mol_type = other RNA
cctcgaggaaggccccagcagg

SEQ ID NO: 1965 - RNA, 22 nt, synthetic construct
  source 1..22: mol_type = other RNA
cctcgaggaggtggcagagggt

SEQ ID NO: 1966 - RNA, 22 nt, synthetic construct
  source 1..22: mol_type = other RNA
cctcgtcctttgctggctgtgg

SEQ ID NO: 1967 - RNA, 22 nt, synthetic construct
  source 1..22: mol_type = other RNA
cctctgccacctcctcgaggaa

SEQ ID NO: 1968 - RNA, 22 nt, synthetic construct
  source 1..22: mol_type = other RNA
cctctgggtccagcacctttgg

SEQ ID NO: 1969 - RNA, 22 nt, synthetic construct
  source 1..22: mol_type = other RNA
cctgcctcccccctcagactca

SEQ ID NO: 1970 - RNA, 22 nt, synthetic construct
  source 1..22: mol_type = other RNA
cctgctggggccttcctcgagg

SEQ ID NO: 1971 - RNA, 22 nt, synthetic construct
  source 1..22: mol_type = other RNA
cctggaactgcccaagccagtc

SEQ ID NO: 1972 - RNA, 22 nt, synthetic construct
  source 1..22: mol_type = other RNA
cctgtgggccccgtccctggaa

SEQ ID NO: 1973 - RNA, 22 nt, synthetic construct
  source 1..22: mol_type = other RNA
ccttcctcgaggaggtggcaga

SEQ ID NO: 1974 - RNA, 22 nt, synthetic construct
  source 1..22: mol_type = other RNA
ccttcgggaatctggtgagtct

SEQ ID NO: 1975 - RNA, 22 nt, synthetic construct
  source 1..22: mol_type = other RNA
ccttctagacctcgtcctttgc

SEQ ID NO: 1976 - RNA, 22 nt, synthetic construct
  source 1..22: mol_type = other RNA
ccttctcctaccttcgggaatc

SEQ ID NO: 1977 - RNA, 22 nt, synthetic construct
  source 1..22: mol_type = other RNA
ccttgcctgctggggccttcct

SEQ ID NO: 1978 - RNA, 22 nt, synthetic construct
  source 1..22: mol_type = other RNA
cctttgctggctgtggagcgga

SEQ ID NO: 1979 - RNA, 22 nt, synthetic construct
  source 1..22: mol_type = other RNA
cctttggctcactctctgtctg

SEQ ID NO: 1980 - RNA, 22 nt, synthetic construct
  source 1..22: mol_type = other RNA
cgaaggtaggagaaggtcttgg

SEQ ID NO: 1981 - RNA, 22 nt, synthetic construct
  source 1..22: mol_type = other RNA
cgaggaaggccccagcaggcaa

SEQ ID NO: 1982 - RNA, 22 nt, synthetic construct
  source 1..22: mol_type = other RNA
cgaggaggtggcagagggtacc

SEQ ID NO: 1983 - RNA, 22 nt, synthetic construct
  source 1..22: mol_type = other RNA
cgaggtctagaaggcagtggat

SEQ ID NO: 1984 - RNA, 22 nt, synthetic construct
  source 1..22: mol_type = other RNA
cgctccacagccagcaaaggac

SEQ ID NO: 1985 - RNA, 22 nt, synthetic construct
  source 1..22: mol_type = other RNA
cgctgcccagtccgctccacag

SEQ ID NO: 1986 - RNA, 22 nt, synthetic construct
  source 1..22: mol_type = other RNA
cggactgggcagcggcccctgt

SEQ ID NO: 1987 - RNA, 22 nt, synthetic construct
  source 1..22: mol_type = other RNA
cgggaatctggtgagtctgagg

SEQ ID NO: 1988 - RNA, 22 nt, synthetic construct
  source 1..22: mol_type = other RNA
cgtccctggaactgcccaagcc

SEQ ID NO: 1989 - RNA, 22 nt, synthetic construct
  source 1..22: mol_type = other RNA
cgtcctttgctggctgtggagc

SEQ ID NO: 1990 - RNA, 22 nt, synthetic construct
  source 1..22: mol_type = other RNA
ctaccttcgggaatctggtgag

SEQ ID NO: 1991 - RNA, 22 nt, synthetic construct
  source 1..22: mol_type = other RNA
ctagaaggcagtggatgagcag

SEQ ID NO: 1992 - RNA, 22 nt, synthetic construct
  source 1..22: mol_type = other RNA
ctagacctcgtcctttgctggc

SEQ ID NO: 1993 - RNA, 22 nt, synthetic construct
  source 1..22: mol_type = other RNA
ctatgcacagcagatcctcctc

SEQ ID NO: 1994 - RNA, 22 nt, synthetic construct
  source 1..22: mol_type = other RNA
ctcaccagattcccgaaggtag

SEQ ID NO: 1995 - RNA, 22 nt, synthetic construct
  source 1..22: mol_type = other RNA
ctcactctctgtctgggctggg

SEQ ID NO: 1996 - RNA, 22 nt, synthetic construct
  source 1..22: mol_type = other RNA
ctcactgctcatccactgcctt

SEQ ID NO: 1997 - RNA, 22 nt, synthetic construct
  source 1..22: mol_type = other RNA
ctcagactcaccagattcccga

SEQ ID NO: 1998 - RNA, 22 nt, synthetic construct
  source 1..22: mol_type = other RNA
ctcatccactgccttctagacc

SEQ ID NO: 1999 - RNA, 22 nt, synthetic construct
  source 1..22: mol_type = other RNA
ctccacagccagcaaaggacga

SEQ ID NO: 2000 - RNA, 22 nt, synthetic construct
  source 1..22: mol_type = other RNA
ctccactcactgctcatccact

SEQ ID NO: 2001 - RNA, 22 nt, synthetic construct
  source 1..22: mol_type = other RNA
ctcccccctcagactcaccaga

SEQ ID NO: 2002 - RNA, 22 nt, synthetic construct
  source 1..22: mol_type = other RNA
ctcctaccttcgggaatctggt

SEQ ID NO: 2003 - RNA, 22 nt, synthetic construct
  source 1..22: mol_type = other RNA
ctcctcgaggaaggccccagca

SEQ ID NO: 2004 - RNA, 22 nt, synthetic construct
  source 1..22: mol_type = other RNA
ctcctctgggtccagcaccttt

SEQ ID NO: 2005 - RNA, 22 nt, synthetic construct
  source 1..22: mol_type = other RNA
ctcgaggaaggccccagcaggc

SEQ ID NO: 2006 - RNA, 22 nt, synthetic construct
  source 1..22: mol_type = other RNA
ctcgaggaggtggcagagggta

SEQ ID NO: 2007 - RNA, 22 nt, synthetic construct
  source 1..22: mol_type = other RNA
ctcgtcctttgctggctgtgga

SEQ ID NO: 2008 - RNA, 22 nt, synthetic construct
  source 1..22: mol_type = other RNA
ctctctgtctgggctggggtac

SEQ ID NO: 2009 - RNA, 22 nt, synthetic construct
  source 1..22: mol_type = other RNA
ctctgccacctcctcgaggaag

SEQ ID NO: 2010 - RNA, 22 nt, synthetic construct
  source 1..22: mol_type = other RNA
ctctgggtccagcacctttggc

SEQ ID NO: 2011 - RNA, 22 nt, synthetic construct
  source 1..22: mol_type = other RNA
ctctgtctgggctggggtaccc

SEQ ID NO: 2012 - RNA, 22 nt, synthetic construct
  source 1..22: mol_type = other RNA
ctgcatgactggcttgggcagt

SEQ ID NO: 2013 - RNA, 22 nt, synthetic construct
  source 1..22: mol_type = other RNA
ctgccacctcctcgaggaaggc

SEQ ID NO: 2014 - RNA, 22 nt, synthetic construct
  source 1..22: mol_type = other RNA
ctgcccaagccagtcatgcagc

SEQ ID NO: 2015 - RNA, 22 nt, synthetic construct
  source 1..22: mol_type = other RNA
ctgcccagtccgctccacagcc

SEQ ID NO: 2016 - RNA, 22 nt, synthetic construct
  source 1..22: mol_type = other RNA
ctgcctcccccctcagactcac

SEQ ID NO: 2017 - RNA, 22 nt, synthetic construct
  source 1..22: mol_type = other RNA
ctgccttctagacctcgtcctt

SEQ ID NO: 2018 - RNA, 22 nt, synthetic construct
  source 1..22: mol_type = other RNA
ctgctcatccactgccttctag

SEQ ID NO: 2019 - RNA, 22 nt, synthetic construct
  source 1..22: mol_type = other RNA
ctgctggggccttcctcgagga

SEQ ID NO: 2020 - RNA, 22 nt, synthetic construct
  source 1..22: mol_type = other RNA
ctgctgtgcatagccaagacct

SEQ ID NO: 2021 - RNA, 22 nt, synthetic construct
  source 1..22: mol_type = other RNA
ctggaactgcccaagccagtca

SEQ ID NO: 2022 - RNA, 22 nt, synthetic construct
  source 1..22: mol_type = other RNA
ctggacccagaggaggatctgc

SEQ ID NO: 2023 - RNA, 22 nt, synthetic construct
  source 1..22: mol_type = other RNA
ctggctgtggagcggactgggc

SEQ ID NO: 2024 - RNA, 22 nt, synthetic construct
  source 1..22: mol_type = other RNA
ctggcttgggcagttccaggga

SEQ ID NO: 2025 - RNA, 22 nt, synthetic construct
  source 1..22: mol_type = other RNA
ctgggctggggtaccctctgcc

SEQ ID NO: 2026 - RNA, 22 nt, synthetic construct
  source 1..22: mol_type = other RNA
ctggggccttcctcgaggaggt

SEQ ID NO: 2027 - RNA, 22 nt, synthetic construct
  source 1..22: mol_type = other RNA
ctggggtaccctctgccacctc

SEQ ID NO: 2028 - RNA, 22 nt, synthetic construct
  source 1..22: mol_type = other RNA
ctgggtccagcacctttggctc

SEQ ID NO: 2029 - RNA, 22 nt, synthetic construct
  source 1..22: mol_type = other RNA
ctggtgagtctgaggggggagg

SEQ ID NO: 2030 - RNA, 22 nt, synthetic construct
  source 1..22: mol_type = other RNA
ctgtctgggctggggtaccctc

SEQ ID NO: 2031 - RNA, 22 nt, synthetic construct
  source 1..22: mol_type = other RNA
ctgtgcatagccaagaccttct

SEQ ID NO: 2032 - RNA, 22 nt, synthetic construct
  source 1..22: mol_type = other RNA
ctgtggagcggactgggcagcg

SEQ ID NO: 2033 - RNA, 22 nt, synthetic construct
  source 1..22: mol_type = other RNA
ctgtgggccccgtccctggaac

SEQ ID NO: 2034 - RNA, 22 nt, synthetic construct
  source 1..22: mol_type = other RNA
cttcctcgaggaggtggcagag

SEQ ID NO: 2035 - RNA, 22 nt, synthetic construct
  source 1..22: mol_type = other RNA
cttcgggaatctggtgagtctg

SEQ ID NO: 2036 - RNA, 22 nt, synthetic construct
  source 1..22: mol_type = other RNA
cttctagacctcgtcctttgct

SEQ ID NO: 2037 - RNA, 22 nt, synthetic construct
  source 1..22: mol_type = other RNA
cttctcctaccttcgggaatct

SEQ ID NO: 2038 - RNA, 22 nt, synthetic construct
  source 1..22: mol_type = other RNA
cttgcctgctggggccttcctc

SEQ ID NO: 2039 - RNA, 22 nt, synthetic construct
  source 1..22: mol_type = other RNA
cttggctatgcacagcagatcc

SEQ ID NO: 2040 - RNA, 22 nt, synthetic construct
  source 1..22: mol_type = other RNA
cttgggcagttccagggacggg

SEQ ID NO: 2041 - RNA, 22 nt, synthetic construct
  source 1..22: mol_type = other RNA
ctttgctggctgtggagcggac

SEQ ID NO: 2042 - RNA, 22 nt, synthetic construct
  source 1..22: mol_type = other RNA
ctttggctcactctctgtctgg

SEQ ID NO: 2043 - RNA, 22 nt, synthetic construct
  source 1..22: mol_type = other RNA
gaaaaggcctgcctcccccctc

SEQ ID NO: 2044 - RNA, 22 nt, synthetic construct
  source 1..22: mol_type = other RNA
gaactgcccaagccagtcatgc

SEQ ID NO: 2045 - RNA, 22 nt, synthetic construct
  source 1..22: mol_type = other RNA
gaaggccccagcaggcaagggc

SEQ ID NO: 2046 - RNA, 22 nt, synthetic construct
  source 1..22: mol_type = other RNA
gaaggtaggagaaggtcttggc

SEQ ID NO: 2047 - RNA, 22 nt, synthetic construct
  source 1..22: mol_type = other RNA
gaaggtcttggctatgcacagc

SEQ ID NO: 2048 - RNA, 22 nt, synthetic construct
  source 1..22: mol_type = other RNA
gaatctggtgagtctgaggggg

SEQ ID NO: 2049 - RNA, 22 nt, synthetic construct
  source 1..22: mol_type = other RNA
gacagagagtgagccaaaggtg

SEQ ID NO: 2050 - RNA, 22 nt, synthetic construct
  source 1..22: mol_type = other RNA
gacccagaggaggatctgctgt

SEQ ID NO: 2051 - RNA, 22 nt, synthetic construct
  source 1..22: mol_type = other RNA
gacctcgtcctttgctggctgt

SEQ ID NO: 2052 - RNA, 22 nt, synthetic construct
  source 1..22: mol_type = other RNA
gaccttctcctaccttcgggaa

SEQ ID NO: 2053 - RNA, 22 nt, synthetic construct
  source 1..22: mol_type = other RNA
gacgaggtctagaaggcagtgg

SEQ ID NO: 2054 - RNA, 22 nt, synthetic construct
  source 1..22: mol_type = other RNA
gactcaccagattcccgaaggt

SEQ ID NO: 2055 - RNA, 22 nt, synthetic construct
  source 1..22: mol_type = other RNA
gactggcttgggcagttccagg

SEQ ID NO: 2056 - RNA, 22 nt, synthetic construct
  source 1..22: mol_type = other RNA
gactgggcagcggcccctgtgg

SEQ ID NO: 2057 - RNA, 22 nt, synthetic construct
  source 1..22: mol_type = other RNA
gagaaggtcttggctatgcaca

SEQ ID NO: 2058 - RNA, 22 nt, synthetic construct
  source 1..22: mol_type = other RNA
gagagtgagccaaaggtgctgg

SEQ ID NO: 2059 - RNA, 22 nt, synthetic construct
  source 1..22: mol_type = other RNA
gagccaaaggtgctggacccag

SEQ ID NO: 2060 - RNA, 22 nt, synthetic construct
  source 1..22: mol_type = other RNA
gaggaaggccccagcaggcaag

SEQ ID NO: 2061 - RNA, 22 nt, synthetic construct
  source 1..22: mol_type = other RNA
gaggaggatctgctgtgcatag

SEQ ID NO: 2062 - RNA, 22 nt, synthetic construct
  source 1..22: mol_type = other RNA
gaggaggtggcagagggtaccc

SEQ ID NO: 2063 - RNA, 22 nt, synthetic construct
  source 1..22: mol_type = other RNA
gaggatctgctgtgcatagcca

SEQ ID NO: 2064 - RNA, 22 nt, synthetic construct
  source 1..22: mol_type = other RNA
gagggtaccccagcccagacag

SEQ ID NO: 2065 - RNA, 22 nt, synthetic construct
  source 1..22: mol_type = other RNA
gaggtctagaaggcagtggatg

SEQ ID NO: 2066 - RNA, 22 nt, synthetic construct
  source 1..22: mol_type = other RNA
gaggtggcagagggtaccccag

SEQ ID NO: 2067 - RNA, 22 nt, synthetic construct
  source 1..22: mol_type = other RNA
gagtctgaggggggaggcaggc

SEQ ID NO: 2068 - RNA, 22 nt, synthetic construct
  source 1..22: mol_type = other RNA
gagtgagccaaaggtgctggac

SEQ ID NO: 2069 - RNA, 22 nt, synthetic construct
  source 1..22: mol_type = other RNA
gatcctcctctgggtccagcac

SEQ ID NO: 2070 - RNA, 22 nt, synthetic construct
  source 1..22: mol_type = other RNA
gatctgctgtgcatagccaaga

SEQ ID NO: 2071 - RNA, 22 nt, synthetic construct
  source 1..22: mol_type = other RNA
gattcccgaaggtaggagaagg

SEQ ID NO: 2072 - RNA, 22 nt, synthetic construct
  source 1..22: mol_type = other RNA
gcaaaggacgaggtctagaagg

SEQ ID NO: 2073 - RNA, 22 nt, synthetic construct
  source 1..22: mol_type = other RNA
gcaagggctgcatgactggctt

SEQ ID NO: 2074 - RNA, 22 nt, synthetic construct
  source 1..22: mol_type = other RNA
gcacagcagatcctcctctggg

SEQ ID NO: 2075 - RNA, 22 nt, synthetic construct
  source 1..22: mol_type = other RNA
gcacctttggctcactctctgt

SEQ ID NO: 2076 - RNA, 22 nt, synthetic construct
  source 1..22: mol_type = other RNA
gcagagggtaccccagcccaga

SEQ ID NO: 2077 - RNA, 22 nt, synthetic construct
  source 1..22: mol_type = other RNA
gcagatcctcctctgggtccag

SEQ ID NO: 2078 - RNA, 22 nt, synthetic construct
  source 1..22: mol_type = other RNA
gcagcccttgcctgctggggcc

SEQ ID NO: 2079 - RNA, 22 nt, synthetic construct
  source 1..22: mol_type = other RNA
gcaggcaagggctgcatgactg

SEQ ID NO: 2080 - RNA, 22 nt, synthetic construct
  source 1..22: mol_type = other RNA
gcagttccagggacggggccca

SEQ ID NO: 2081 - RNA, 22 nt, synthetic construct
  source 1..22: mol_type = other RNA
gcatagccaagaccttctccta

SEQ ID NO: 2082 - RNA, 22 nt, synthetic construct
  source 1..22: mol_type = other RNA
gcatgactggcttgggcagttc

SEQ ID NO: 2083 - RNA, 22 nt, synthetic construct
  source 1..22: mol_type = other RNA
gccaaaggtgctggacccagag

SEQ ID NO: 2084 - RNA, 22 nt, synthetic construct
  source 1..22: mol_type = other RNA
gccaagaccttctcctaccttc

SEQ ID NO: 2085 - RNA, 22 nt, synthetic construct
  source 1..22: mol_type = other RNA
gccacctcctcgaggaaggccc

SEQ ID NO: 2086 - RNA, 22 nt, synthetic construct
  source 1..22: mol_type = other RNA
gccagcaaaggacgaggtctag

SEQ ID NO: 2087 - RNA, 22 nt, synthetic construct
  source 1..22: mol_type = other RNA
gccagtcatgcagcccttgcct

SEQ ID NO: 2088 - RNA, 22 nt, synthetic construct
  source 1..22: mol_type = other RNA
gcccaagccagtcatgcagccc

SEQ ID NO: 2089 - RNA, 22 nt, synthetic construct
  source 1..22: mol_type = other RNA
gcccagacagagagtgagccaa

SEQ ID NO: 2090 - RNA, 22 nt, synthetic construct
  source 1..22: mol_type = other RNA
gcccagtccgctccacagccag

SEQ ID NO: 2091 - RNA, 22 nt, synthetic construct
  source 1..22: mol_type = other RNA
gccccagcaggcaagggctgca

SEQ ID NO: 2092 - RNA, 22 nt, synthetic construct
  source 1..22: mol_type = other RNA
gccccgtccctggaactgccca

SEQ ID NO: 2093 - RNA, 22 nt, synthetic construct
  source 1..22: mol_type = other RNA
gcccttgcctgctggggccttc

SEQ ID NO: 2094 - RNA, 22 nt, synthetic construct
  source 1..22: mol_type = other RNA
gccgctgcccagtccgctccac

SEQ ID NO: 2095 - RNA, 22 nt, synthetic construct
  source 1..22: mol_type = other RNA
gcctcccccctcagactcacca

SEQ ID NO: 2096 - RNA, 22 nt, synthetic construct
  source 1..22: mol_type = other RNA
gcctgcctcccccctcagactc

SEQ ID NO: 2097 - RNA, 22 nt, synthetic construct
  source 1..22: mol_type = other RNA
gcctgctggggccttcctcgag

SEQ ID NO: 2098 - RNA, 22 nt, synthetic construct
  source 1..22: mol_type = other RNA
gccttcctcgaggaggtggcag

SEQ ID NO: 2099 - RNA, 22 nt, synthetic construct
  source 1..22: mol_type = other RNA
gccttctagacctcgtcctttg

SEQ ID NO: 2100 - RNA, 22 nt, synthetic construct
  source 1..22: mol_type = other RNA
gctatgcacagcagatcctcct

SEQ ID NO: 2101 - RNA, 22 nt, synthetic construct
  source 1..22: mol_type = other RNA
gctcactctctgtctgggctgg

SEQ ID NO: 2102 - RNA, 22 nt, synthetic construct
  source 1..22: mol_type = other RNA
gctcatccactgccttctagac

SEQ ID NO: 2103 - RNA, 22 nt, synthetic construct
  source 1..22: mol_type = other RNA
gctccacagccagcaaaggacg

SEQ ID NO: 2104 - RNA, 22 nt, synthetic construct
  source 1..22: mol_type = other RNA
gctgcatgactggcttgggcag

SEQ ID NO: 2105 - RNA, 22 nt, synthetic construct
  source 1..22: mol_type = other RNA
gctgcccagtccgctccacagc

SEQ ID NO: 2106 - RNA, 22 nt, synthetic construct
  source 1..22: mol_type = other RNA
gctggacccagaggaggatctg

SEQ ID NO: 2107 - RNA, 22 nt, synthetic construct
  source 1..22: mol_type = other RNA
gctggctgtggagcggactggg

SEQ ID NO: 2108 - RNA, 22 nt, synthetic construct
  source 1..22: mol_type = other RNA
gctggggccttcctcgaggagg

SEQ ID NO: 2109 - RNA, 22 nt, synthetic construct
  source 1..22: mol_type = other RNA
gctggggtaccctctgccacct

SEQ ID NO: 2110 - RNA, 22 nt, synthetic construct
  source 1..22: mol_type = other RNA
gctgtgcatagccaagaccttc

SEQ ID NO: 2111 - RNA, 22 nt, synthetic construct
  source 1..22: mol_type = other RNA
gctgtggagcggactgggcagc

SEQ ID NO: 2112 - RNA, 22 nt, synthetic construct
  source 1..22: mol_type = other RNA
gcttgggcagttccagggacgg

SEQ ID NO: 2113 - RNA, 22 nt, synthetic construct
  source 1..22: mol_type = other RNA
ggaaaaggcctgcctcccccct

SEQ ID NO: 2114 - RNA, 22 nt, synthetic construct
  source 1..22: mol_type = other RNA
ggaactgcccaagccagtcatg

SEQ ID NO: 2115 - RNA, 22 nt, synthetic construct
  source 1..22: mol_type = other RNA
ggaaggccccagcaggcaaggg

SEQ ID NO: 2116 - RNA, 22 nt, synthetic construct
  source 1..22: mol_type = other RNA
ggaatctggtgagtctgagggg

SEQ ID NO: 2117 - RNA, 22 nt, synthetic construct
  source 1..22: mol_type = other RNA
ggacccagaggaggatctgctg

SEQ ID NO: 2118 - RNA, 22 nt, synthetic construct
  source 1..22: mol_type = other RNA
ggacgaggtctagaaggcagtg

SEQ ID NO: 2119 - RNA, 22 nt, synthetic construct
  source 1..22: mol_type = other RNA
ggactgggcagcggcccctgtg

SEQ ID NO: 2120 - RNA, 22 nt, synthetic construct
  source 1..22: mol_type = other RNA
ggagaaggtcttggctatgcac

SEQ ID NO: 2121 - RNA, 22 nt, synthetic construct
  source 1..22: mol_type = other RNA
ggaggatctgctgtgcatagcc

SEQ ID NO: 2122 - RNA, 22 nt, synthetic construct
  source 1..22: mol_type = other RNA
ggaggtggcagagggtacccca

SEQ ID NO: 2123 - RNA, 22 nt, synthetic construct
  source 1..22: mol_type = other RNA
ggatctgctgtgcatagccaag

SEQ ID NO: 2124 - RNA, 22 nt, synthetic construct
  source 1..22: mol_type = other RNA
ggcaagggctgcatgactggct

SEQ ID NO: 2125 - RNA, 22 nt, synthetic construct
  source 1..22: mol_type = other RNA
ggcagagggtaccccagcccag

SEQ ID NO: 2126 - RNA, 22 nt, synthetic construct
  source 1..22: mol_type = other RNA
ggcagttccagggacggggccc

SEQ ID NO: 2127 - RNA, 22 nt, synthetic construct
  source 1..22: mol_type = other RNA
ggccccagcaggcaagggctgc

SEQ ID NO: 2128 - RNA, 22 nt, synthetic construct
  source 1..22: mol_type = other RNA
ggccccgtccctggaactgccc

SEQ ID NO: 2129 - RNA, 22 nt, synthetic construct
  source 1..22: mol_type = other RNA
ggccgctgcccagtccgctcca

SEQ ID NO: 2130 - RNA, 22 nt, synthetic construct
  source 1..22: mol_type = other RNA
ggcctgcctcccccctcagact

SEQ ID NO: 2131 - RNA, 22 nt, synthetic construct
  source 1..22: mol_type = other RNA
ggccttcctcgaggaggtggca

SEQ ID NO: 2132 - RNA, 22 nt, synthetic construct
  source 1..22: mol_type = other RNA
ggctatgcacagcagatcctcc

SEQ ID NO: 2133 - RNA, 22 nt, synthetic construct
  source 1..22: mol_type = other RNA
ggctcactctctgtctgggctg

SEQ ID NO: 2134 - RNA, 22 nt, synthetic construct
  source 1..22: mol_type = other RNA
ggctgcatgactggcttgggca

SEQ ID NO: 2135 - RNA, 22 nt, synthetic construct
  source 1..22: mol_type = other RNA
ggctggggtaccctctgccacc

SEQ ID NO: 2136 - RNA, 22 nt, synthetic construct
  source 1..22: mol_type = other RNA
ggctgtggagcggactgggcag

SEQ ID NO: 2137 - RNA, 22 nt, synthetic construct
  source 1..22: mol_type = other RNA
ggcttgggcagttccagggacg

SEQ ID NO: 2138 - RNA, 22 nt, synthetic construct
  source 1..22: mol_type = other RNA
gggaatctggtgagtctgaggg

SEQ ID NO: 2139 - RNA, 22 nt, synthetic construct
  source 1..22: mol_type = other RNA
gggcagttccagggacggggcc

SEQ ID NO: 2140 - RNA, 22 nt, synthetic construct
  source 1..22: mol_type = other RNA
gggccccgtccctggaactgcc

SEQ ID NO: 2141 - RNA, 22 nt, synthetic construct
  source 1..22: mol_type = other RNA
gggccttcctcgaggaggtggc

SEQ ID NO: 2142 - RNA, 22 nt, synthetic construct
  source 1..22: mol_type = other RNA
gggctgcatgactggcttgggc

SEQ ID NO: 2143 - RNA, 22 nt, synthetic construct
  source 1..22: mol_type = other RNA
gggctggggtaccctctgccac

SEQ ID NO: 2144 - RNA, 22 nt, synthetic construct
  source 1..22: mol_type = other RNA
ggggccttcctcgaggaggtgg

SEQ ID NO: 2145 - RNA, 22 nt, synthetic construct
  source 1..22: mol_type = other RNA
ggggtaccctctgccacctcct

SEQ ID NO: 2146 - RNA, 22 nt, synthetic construct
  source 1..22: mol_type = other RNA
gggtaccccagcccagacagag

SEQ ID NO: 2147 - RNA, 22 nt, synthetic construct
  source 1..22: mol_type = other RNA
gggtaccctctgccacctcctc

SEQ ID NO: 2148 - RNA, 22 nt, synthetic construct
  source 1..22: mol_type = other RNA
gggtccagcacctttggctcac

SEQ ID NO: 2149 - RNA, 22 nt, synthetic construct
  source 1..22: mol_type = other RNA
ggtaccccagcccagacagaga

SEQ ID NO: 2150 - RNA, 22 nt, synthetic construct
  source 1..22: mol_type = other RNA
ggtaccctctgccacctcctcg

SEQ ID NO: 2151 - RNA, 22 nt, synthetic construct
  source 1..22: mol_type = other RNA
ggtaggagaaggtcttggctat

SEQ ID NO: 2152 - RNA, 22 nt, synthetic construct
  source 1..22: mol_type = other RNA
ggtccagcacctttggctcact

SEQ ID NO: 2153 - RNA, 22 nt, synthetic construct
  source 1..22: mol_type = other RNA
ggtctagaaggcagtggatgag

SEQ ID NO: 2154 - RNA, 22 nt, synthetic construct
  source 1..22: mol_type = other RNA
ggtcttggctatgcacagcaga

SEQ ID NO: 2155 - RNA, 22 nt, synthetic construct
  source 1..22: mol_type = other RNA
ggtgagtctgaggggggaggca

SEQ ID NO: 2156 - RNA, 22 nt, synthetic construct
  source 1..22: mol_type = other RNA
ggtgctggacccagaggaggat

SEQ ID NO: 2157 - RNA, 22 nt, synthetic construct
  source 1..22: mol_type = other RNA
ggtggcagagggtaccccagcc

SEQ ID NO: 2158 - RNA, 22 nt, synthetic construct
  source 1..22: mol_type = other RNA
gtaccccagcccagacagagag

SEQ ID NO: 2159 - RNA, 22 nt, synthetic construct
  source 1..22: mol_type = other RNA
gtaccctctgccacctcctcga

SEQ ID NO: 2160 - RNA, 22 nt, synthetic construct
  source 1..22: mol_type = other RNA
gtaggagaaggtcttggctatg

SEQ ID NO: 2161 - RNA, 22 nt, synthetic construct
  source 1..22: mol_type = other RNA
gtcatgcagcccttgcctgctg

SEQ ID NO: 2162 - RNA, 22 nt, synthetic construct
  source 1..22: mol_type = other RNA
gtccagcacctttggctcactc

SEQ ID NO: 2163 - RNA, 22 nt, synthetic construct
  source 1..22: mol_type = other RNA
gtccctggaactgcccaagcca

SEQ ID NO: 2164 - RNA, 22 nt, synthetic construct
  source 1..22: mol_type = other RNA
gtccgctccacagccagcaaag

SEQ ID NO: 2165 - RNA, 22 nt, synthetic construct
  source 1..22: mol_type = other RNA
gtcctttgctggctgtggagcg

SEQ ID NO: 2166 - RNA, 22 nt, synthetic construct
  source 1..22: mol_type = other RNA
gtctagaaggcagtggatgagc

SEQ ID NO: 2167 - RNA, 22 nt, synthetic construct
  source 1..22: mol_type = other RNA
gtctgggctggggtaccctctg

SEQ ID NO: 2168 - RNA, 22 nt, synthetic construct
  source 1..22: mol_type = other RNA
gtcttggctatgcacagcagat

SEQ ID NO: 2169 - RNA, 22 nt, synthetic construct
  source 1..22: mol_type = other RNA
gtgagccaaaggtgctggaccc

SEQ ID NO: 2170 - RNA, 22 nt, synthetic construct
  source 1..22: mol_type = other RNA
gtgagtctgaggggggaggcag

SEQ ID NO: 2171 - RNA, 22 nt, synthetic construct
  source 1..22: mol_type = other RNA
gtgcatagccaagaccttctcc

SEQ ID NO: 2172 - RNA, 22 nt, synthetic construct
  source 1..22: mol_type = other RNA
gtgctggacccagaggaggatc

SEQ ID NO: 2173 - RNA, 22 nt, synthetic construct
  source 1..22: mol_type = other RNA
gtggagcggactgggcagcggc

SEQ ID NO: 2174 - RNA, 22 nt, synthetic construct
  source 1..22: mol_type = other RNA
gtggcagagggtaccccagccc

SEQ ID NO: 2175 - RNA, 22 nt, synthetic construct
  source 1..22: mol_type = other RNA
gtgggccccgtccctggaactg

SEQ ID NO: 2176 - RNA, 22 nt, synthetic construct
  source 1..22: mol_type = other RNA
gttccagggacggggcccacag

SEQ ID NO: 2177 - RNA, 22 nt, synthetic construct
  source 1..22: mol_type = other RNA
taccccagcccagacagagagt

SEQ ID NO: 2178 - RNA, 22 nt, synthetic construct
  source 1..22: mol_type = other RNA
taccctctgccacctcctcgag

SEQ ID NO: 2179 - RNA, 22 nt, synthetic construct
  source 1..22: mol_type = other RNA
taccttcgggaatctggtgagt

SEQ ID NO: 2180 - RNA, 22 nt, synthetic construct
  source 1..22: mol_type = other RNA
tagaaggcagtggatgagcagt

SEQ ID NO: 2181 - RNA, 22 nt, synthetic construct
  source 1..22: mol_type = other RNA
tagacctcgtcctttgctggct

SEQ ID NO: 2182 - RNA, 22 nt, synthetic construct
  source 1..22: mol_type = other RNA
tagccaagaccttctcctacct

SEQ ID NO: 2183 - RNA, 22 nt, synthetic construct
  source 1..22: mol_type = other RNA
taggagaaggtcttggctatgc

SEQ ID NO: 2184 - RNA, 22 nt, synthetic construct
  source 1..22: mol_type = other RNA
tatgcacagcagatcctcctct

SEQ ID NO: 2185 - RNA, 22 nt, synthetic construct
  source 1..22: mol_type = other RNA
tcaccagattcccgaaggtagg

SEQ ID NO: 2186 - RNA, 22 nt, synthetic construct
  source 1..22: mol_type = other RNA
tcactctctgtctgggctgggg

SEQ ID NO: 2187 - RNA, 22 nt, synthetic construct
  source 1..22: mol_type = other RNA
tcactgctcatccactgccttc

SEQ ID NO: 2188 - RNA, 22 nt, synthetic construct
  source 1..22: mol_type = other RNA
tcagactcaccagattcccgaa

SEQ ID NO: 2189 - RNA, 22 nt, synthetic construct
  source 1..22: mol_type = other RNA
tcatccactgccttctagacct

SEQ ID NO: 2190 - RNA, 22 nt, synthetic construct
  source 1..22: mol_type = other RNA
tcatgcagcccttgcctgctgg

SEQ ID NO: 2191 - RNA, 22 nt, synthetic construct
  source 1..22: mol_type = other RNA
tccacagccagcaaaggacgag

SEQ ID NO: 2192 - RNA, 22 nt, synthetic construct
  source 1..22: mol_type = other RNA
tccactcactgctcatccactg

SEQ ID NO: 2193 - RNA, 22 nt, synthetic construct
  source 1..22: mol_type = other RNA
tccactgccttctagacctcgt

SEQ ID NO: 2194 - RNA, 22 nt, synthetic construct
  source 1..22: mol_type = other RNA
tccagcacctttggctcactct

SEQ ID NO: 2195 - RNA, 22 nt, synthetic construct
  source 1..22: mol_type = other RNA
tccagggacggggcccacaggg

SEQ ID NO: 2196 - RNA, 22 nt, synthetic construct
  source 1..22: mol_type = other RNA
tcccccctcagactcaccagat

SEQ ID NO: 2197 - RNA, 22 nt, synthetic construct
  source 1..22: mol_type = other RNA
tcccgaaggtaggagaaggtct

SEQ ID NO: 2198 - RNA, 22 nt, synthetic construct
  source 1..22: mol_type = other RNA
tccctggaactgcccaagccag

SEQ ID NO: 2199 - RNA, 22 nt, synthetic construct
  source 1..22: mol_type = other RNA
tccgctccacagccagcaaagg

SEQ ID NO: 2200 - RNA, 22 nt, synthetic construct
  source 1..22: mol_type = other RNA
tcctaccttcgggaatctggtg

SEQ ID NO: 2201 - RNA, 22 nt, synthetic construct
  source 1..22: mol_type = other RNA
tcctcctctgggtccagcacct

SEQ ID NO: 2202 - RNA, 22 nt, synthetic construct
  source 1..22: mol_type = other RNA
tcctcgaggaaggccccagcag

SEQ ID NO: 2203 - RNA, 22 nt, synthetic construct
  source 1..22: mol_type = other RNA
tcctcgaggaggtggcagaggg

SEQ ID NO: 2204 - RNA, 22 nt, synthetic construct
  source 1..22: mol_type = other RNA
tcctctgggtccagcacctttg

SEQ ID NO: 2205 - RNA, 22 nt, synthetic construct
  source 1..22: mol_type = other RNA
tcctttgctggctgtggagcgg

SEQ ID NO: 2206 - RNA, 22 nt, synthetic construct
  source 1..22: mol_type = other RNA
tcgaggaaggccccagcaggca

SEQ ID NO: 2207 - RNA, 22 nt, synthetic construct
  source 1..22: mol_type = other RNA
tcgaggaggtggcagagggtac

SEQ ID NO: 2208 - RNA, 22 nt, synthetic construct
  source 1..22: mol_type = other RNA
tcgggaatctggtgagtctgag

SEQ ID NO: 2209 - RNA, 22 nt, synthetic construct
  source 1..22: mol_type = other RNA
tcgtcctttgctggctgtggag

SEQ ID NO: 2210 - RNA, 22 nt, synthetic construct
  source 1..22: mol_type = other RNA
tctagaaggcagtggatgagca

SEQ ID NO: 2211 - RNA, 22 nt, synthetic construct
  source 1..22: mol_type = other RNA
tctagacctcgtcctttgctgg

SEQ ID NO: 2212 - RNA, 22 nt, synthetic construct
  source 1..22: mol_type = other RNA
tctcctaccttcgggaatctgg

SEQ ID NO: 2213 - RNA, 22 nt, synthetic construct
  source 1..22: mol_type = other RNA
tctctgtctgggctggggtacc

SEQ ID NO: 2214 - RNA, 22 nt, synthetic construct
  source 1..22: mol_type = other RNA
tctgccacctcctcgaggaagg

SEQ ID NO: 2215 - RNA, 22 nt, synthetic construct
  source 1..22: mol_type = other RNA
tctgctgtgcatagccaagacc

SEQ ID NO: 2216 - RNA, 22 nt, synthetic construct
  source 1..22: mol_type = other RNA
tctgggctggggtaccctctgc

SEQ ID NO: 2217 - RNA, 22 nt, synthetic construct
  source 1..22: mol_type = other RNA
tctgggtccagcacctttggct

SEQ ID NO: 2218 - RNA, 22 nt, synthetic construct
  source 1..22: mol_type = other RNA
tctggtgagtctgaggggggag

SEQ ID NO: 2219 - RNA, 22 nt, synthetic construct
  source 1..22: mol_type = other RNA
tctgtctgggctggggtaccct

SEQ ID NO: 2220 - RNA, 22 nt, synthetic construct
  source 1..22: mol_type = other RNA
tcttggctatgcacagcagatc

SEQ ID NO: 2221 - RNA, 22 nt, synthetic construct
  source 1..22: mol_type = other RNA
tgactggcttgggcagttccag

SEQ ID NO: 2222 - RNA, 22 nt, synthetic construct
  source 1..22: mol_type = other RNA
tgagccaaaggtgctggaccca

SEQ ID NO: 2223 - RNA, 22 nt, synthetic construct
  source 1..22: mol_type = other RNA
tgagtctgaggggggaggcagg

SEQ ID NO: 2224 - RNA, 22 nt, synthetic construct
  source 1..22: mol_type = other RNA
tgcacagcagatcctcctctgg

SEQ ID NO: 2225 - RNA, 22 nt, synthetic construct
  source 1..22: mol_type = other RNA
tgcagcccttgcctgctggggc

SEQ ID NO: 2226 - RNA, 22 nt, synthetic construct
  source 1..22: mol_type = other RNA
tgcatagccaagaccttctcct

SEQ ID NO: 2227 - RNA, 22 nt, synthetic construct
  source 1..22: mol_type = other RNA
tgcatgactggcttgggcagtt

SEQ ID NO: 2228 - RNA, 22 nt, synthetic construct
  source 1..22: mol_type = other RNA
tgccacctcctcgaggaaggcc

SEQ ID NO: 2229 - RNA, 22 nt, synthetic construct
  source 1..22: mol_type = other RNA
tgcccaagccagtcatgcagcc

SEQ ID NO: 2230 - RNA, 22 nt, synthetic construct
  source 1..22: mol_type = other RNA
tgcccagtccgctccacagcca

SEQ ID NO: 2231 - RNA, 22 nt, synthetic construct
  source 1..22: mol_type = other RNA
tgcctcccccctcagactcacc

SEQ ID NO: 2232 - RNA, 22 nt, synthetic construct
  source 1..22: mol_type = other RNA
tgcctgctggggccttcctcga

SEQ ID NO: 2233 - RNA, 22 nt, synthetic construct
  source 1..22: mol_type = other RNA
tgccttctagacctcgtccttt

SEQ ID NO: 2234 - RNA, 22 nt, synthetic construct
  source 1..22: mol_type = other RNA
tgctcatccactgccttctaga

SEQ ID NO: 2235 - RNA, 22 nt, synthetic construct
  source 1..22: mol_type = other RNA
tgctggacccagaggaggatct

SEQ ID NO: 2236 - RNA, 22 nt, synthetic construct
  source 1..22: mol_type = other RNA
tgctggctgtggagcggactgg

SEQ ID NO: 2237 - RNA, 22 nt, synthetic construct
  source 1..22: mol_type = other RNA
tgctggggccttcctcgaggag

SEQ ID NO: 2238 - RNA, 22 nt, synthetic construct
  source 1..22: mol_type = other RNA
tgctgtgcatagccaagacctt

SEQ ID NO: 2239 - RNA, 22 nt, synthetic construct
  source 1..22: mol_type = other RNA
tggaactgcccaagccagtcat

SEQ ID NO: 2240 - RNA, 22 nt, synthetic construct
  source 1..22: mol_type = other RNA
tggacccagaggaggatctgct

SEQ ID NO: 2241 - RNA, 22 nt, synthetic construct
  source 1..22: mol_type = other RNA
tggagcggactgggcagcggcc

SEQ ID NO: 2242 - RNA, 22 nt, synthetic construct
  source 1..22: mol_type = other RNA
tggcagagggtaccccagccca

SEQ ID NO: 2243 - RNA, 22 nt, synthetic construct
  source 1..22: mol_type = other RNA
tggctatgcacagcagatcctc

SEQ ID NO: 2244 - RNA, 22 nt, synthetic construct
  source 1..22: mol_type = other RNA
tggctcactctctgtctgggct

SEQ ID NO: 2245 - RNA, 22 nt, synthetic construct
  source 1..22: mol_type = other RNA
tggctgtggagcggactgggca

SEQ ID NO: 2246 - RNA, 22 nt, synthetic construct
  source 1..22: mol_type = other RNA
tggcttgggcagttccagggac

SEQ ID NO: 2247 - RNA, 22 nt, synthetic construct
  source 1..22: mol_type = other RNA
tgggcagttccagggacggggc

SEQ ID NO: 2248 - RNA, 22 nt, synthetic construct
  source 1..22: mol_type = other RNA
tgggccccgtccctggaactgc

SEQ ID NO: 2249 - RNA, 22 nt, synthetic construct
  source 1..22: mol_type = other RNA
tgggctggggtaccctctgcca

SEQ ID NO: 2250 - RNA, 22 nt, synthetic construct
  source 1..22: mol_type = other RNA
tggggccttcctcgaggaggtg

SEQ ID NO: 2251 - RNA, 22 nt, synthetic construct
  source 1..22: mol_type = other RNA
tggggtaccctctgccacctcc

SEQ ID NO: 2252 - RNA, 22 nt, synthetic construct
  source 1..22: mol_type = other RNA
tgggtccagcacctttggctca

SEQ ID NO: 2253 - RNA, 22 nt, synthetic construct
  source 1..22: mol_type = other RNA
tggtgagtctgaggggggaggc

SEQ ID NO: 2254 - RNA, 22 nt, synthetic construct
  source 1..22: mol_type = other RNA
tgtctgggctggggtaccctct

SEQ ID NO: 2255 - RNA, 22 nt, synthetic construct
  source 1..22: mol_type = other RNA
tgtgcatagccaagaccttctc

SEQ ID NO: 2256 - RNA, 22 nt, synthetic construct
  source 1..22: mol_type = other RNA
tgtggagcggactgggcagcgg

SEQ ID NO: 2257 - RNA, 22 nt, synthetic construct
  source 1..22: mol_type = other RNA
tgtgggccccgtccctggaact

SEQ ID NO: 2258 - RNA, 22 nt, synthetic construct
  source 1..22: mol_type = other RNA
ttccagggacggggcccacagg

SEQ ID NO: 2259 - RNA, 22 nt, synthetic construct
  source 1..22: mol_type = other RNA
ttcccgaaggtaggagaaggtc

SEQ ID NO: 2260 - RNA, 22 nt, synthetic construct
  source 1..22: mol_type = other RNA
ttcctcgaggaggtggcagagg

SEQ ID NO: 2261 - RNA, 22 nt, synthetic construct
  source 1..22: mol_type = other RNA
ttcgggaatctggtgagtctga

SEQ ID NO: 2262 - RNA, 22 nt, synthetic construct
  source 1..22: mol_type = other RNA
ttctagacctcgtcctttgctg

SEQ ID NO: 2263 - RNA, 22 nt, synthetic construct
  source 1..22: mol_type = other RNA
ttctcctaccttcgggaatctg

SEQ ID NO: 2264 - RNA, 22 nt, synthetic construct
  source 1..22: mol_type = other RNA
ttgcctgctggggccttcctcg

SEQ ID NO: 2265 - RNA, 22 nt, synthetic construct
  source 1..22: mol_type = other RNA
ttgctggctgtggagcggactg

SEQ ID NO: 2266 - RNA, 22 nt, synthetic construct
  source 1..22: mol_type = other RNA
ttggctatgcacagcagatcct

SEQ ID NO: 2267 - RNA, 22 nt, synthetic construct
  source 1..22: mol_type = other RNA
ttggctcactctctgtctgggc

SEQ ID NO: 2268 - RNA, 22 nt, synthetic construct
  source 1..22: mol_type = other RNA
ttgggcagttccagggacgggg

SEQ ID NO: 2269 - RNA, 22 nt, synthetic construct
  source 1..22: mol_type = other RNA
tttgctggctgtggagcggact

SEQ ID NO: 2270 - RNA, 22 nt, synthetic construct
  source 1..22: mol_type = other RNA
tttggctcactctctgtctggg

SEQ ID NO: 2271 - RNA, 20 nt, synthetic construct
  source 1..20: mol_type = other RNA
aaaaccactcgtggccccac

SEQ ID NO: 2272 - RNA, 20 nt, synthetic construct
  source 1..20: mol_type = other RNA
aaaactggtgcagccctttg

SEQ ID NO: 2273 - RNA, 20 nt, synthetic construct
  source 1..20: mol_type = other RNA
aaaccactcgtggccccacc

SEQ ID NO: 2274 - RNA, 20 nt, synthetic construct
  source 1..20: mol_type = other RNA
aaactggtgcagccctttgt

SEQ ID NO: 2275 - RNA, 20 nt, synthetic construct
  source 1..20: mol_type = other RNA
aaaggccaggatgcgtggcc

SEQ ID NO: 2276 - RNA, 20 nt, synthetic construct
  source 1..20: mol_type = other RNA
aaagggctgcaccagtttta

SEQ ID NO: 2277 - RNA, 20 nt, synthetic construct
  source 1..20: mol_type = other RNA
aacacctgcagaagatgcca

SEQ ID NO: 2278 - RNA, 20 nt, synthetic construct
  source 1..20: mol_type = other RNA
aacacctgtgccgccttgtc

SEQ ID NO: 2279 - RNA, 20 nt, synthetic construct
  source 1..20: mol_type = other RNA
aacaggtagctggggtgcgt

SEQ ID NO: 2280 - RNA, 20 nt, synthetic construct
  source 1..20: mol_type = other RNA
aaccactcgtggccccacca

SEQ ID NO: 2281 - RNA, 20 nt, synthetic construct
  source 1..20: mol_type = other RNA
aaccccaataccagcctagg

SEQ ID NO: 2282 - RNA, 20 nt, synthetic construct
  source 1..20: mol_type = other RNA
aaccgtctggtggccgacgt

SEQ ID NO: 2283 - RNA, 20 nt, synthetic construct
  source 1..20: mol_type = other RNA
aacgtgccttctggcatctt

SEQ ID NO: 2284 - RNA, 20 nt, synthetic construct
  source 1..20: mol_type = other RNA
aactgcttgtccaggccacg

SEQ ID NO: 2285 - RNA, 20 nt, synthetic construct
  source 1..20: mol_type = other RNA
aactggtgcagccctttgta

SEQ ID NO: 2286 - RNA, 20 nt, synthetic construct
  source 1..20: mol_type = other RNA
aagaacgtgccttctggcat

SEQ ID NO: 2287 - RNA, 20 nt, synthetic construct
  source 1..20: mol_type = other RNA
aagatgccagaaggcacgtt

SEQ ID NO: 2288 - RNA, 20 nt, synthetic construct
  source 1..20: mol_type = other RNA
aagcagtgcccgcagcctgc

SEQ ID NO: 2289 - RNA, 20 nt, synthetic construct
  source 1..20: mol_type = other RNA
aagcagttggagtccagacg

SEQ ID NO: 2290 - RNA, 20 nt, synthetic construct
  source 1..20: mol_type = other RNA
aagcgacagccccgatcctg

SEQ ID NO: 2291 - RNA, 20 nt, synthetic construct
  source 1..20: mol_type = other RNA
aagctggagtcggcatactc

SEQ ID NO: 2292 - RNA, 20 nt, synthetic construct
  source 1..20: mol_type = other RNA
aaggaggatgcgcctagtga

SEQ ID NO: 2293 - RNA, 20 nt, synthetic construct
  source 1..20: mol_type = other RNA
aaggcacgttcttagtacgt

SEQ ID NO: 2294 - RNA, 20 nt, synthetic construct
  source 1..20: mol_type = other RNA
aaggccaggatgcgtggcct

SEQ ID NO: 2295 - RNA, 20 nt, synthetic construct
  source 1..20: mol_type = other RNA
aaggcggcacaggtgttgca

SEQ ID NO: 2296 - RNA, 20 nt, synthetic construct
  source 1..20: mol_type = other RNA
aaggctgaccacatccggaa

SEQ ID NO: 2297 - RNA, 20 nt, synthetic construct
  source 1..20: mol_type = other RNA
aagggctgcaccagttttag

SEQ ID NO: 2298 - RNA, 20 nt, synthetic construct
  source 1..20: mol_type = other RNA
aaggggtactgtcggaggta

SEQ ID NO: 2299 - RNA, 20 nt, synthetic construct
  source 1..20: mol_type = other RNA
aataccagcctaggcaagtg

SEQ ID NO: 2300 - RNA, 20 nt, synthetic construct
  source 1..20: mol_type = other RNA
aatgcgtacattggtggggc

SEQ ID NO: 2301 - RNA, 20 nt, synthetic construct
  source 1..20: mol_type = other RNA
aatggaaccccaataccagc

SEQ ID NO: 2302 - RNA, 20 nt, synthetic construct
  source 1..20: mol_type = other RNA
aatgtacgcattgagtatgc

SEQ ID NO: 2303 - RNA, 20 nt, synthetic construct
  source 1..20: mol_type = other RNA
acaaagggctgcaccagttt

SEQ ID NO: 2304 - RNA, 20 nt, synthetic construct
  source 1..20: mol_type = other RNA
acaacacctgcagaagatgc

SEQ ID NO: 2305 - RNA, 20 nt, synthetic construct
  source 1..20: mol_type = other RNA
acaagcagttggagtccaga

SEQ ID NO: 2306 - RNA, 20 nt, synthetic construct
  source 1..20: mol_type = other RNA
acaaggcggcacaggtgttg

SEQ ID NO: 2307 - RNA, 20 nt, synthetic construct
  source 1..20: mol_type = other RNA
acaaggctgaccacatccgg

SEQ ID NO: 2308 - RNA, 20 nt, synthetic construct
  source 1..20: mol_type = other RNA
acacctaaaactggtgcagc

SEQ ID NO: 2309 - RNA, 20 nt, synthetic construct
  source 1..20: mol_type = other RNA
acacctgcagaagatgccag

SEQ ID NO: 2310 - RNA, 20 nt, synthetic construct
  source 1..20: mol_type = other RNA
acacctgtgccgccttgtca

SEQ ID NO: 2311 - RNA, 20 nt, synthetic construct
  source 1..20: mol_type = other RNA
acagcacgcaccccagctac

SEQ ID NO: 2312 - RNA, 20 nt, synthetic construct
  source 1..20: mol_type = other RNA
acagcagtggctggtggagg

SEQ ID NO: 2313 - RNA, 20 nt, synthetic construct
  source 1..20: mol_type = other RNA
acagccccgatcctgctccc

SEQ ID NO: 2314 - RNA, 20 nt, synthetic construct
  source 1..20: mol_type = other RNA
acagcgtgaacaggtagctg

SEQ ID NO: 2315 - RNA, 20 nt, synthetic construct
  source 1..20: mol_type = other RNA
acaggtagctggggtgcgtg

SEQ ID NO: 2316 - RNA, 20 nt, synthetic construct
  source 1..20: mol_type = other RNA
acaggtgttgcaggctgcgg

SEQ ID NO: 2317 - RNA, 20 nt, synthetic construct
  source 1..20: mol_type = other RNA
acagtaccccttccagctct

SEQ ID NO: 2318 - RNA, 20 nt, synthetic construct
  source 1..20: mol_type = other RNA
acagtcagagctggaagggg

SEQ ID NO: 2319 - RNA, 20 nt, synthetic construct
  source 1..20: mol_type = other RNA
acatagtgctgcacaaggct

SEQ ID NO: 2320 - RNA, 20 nt, synthetic construct
  source 1..20: mol_type = other RNA
acatccggaaaggccaggat

SEQ ID NO: 2321 - RNA, 20 nt, synthetic construct
  source 1..20: mol_type = other RNA
acattggtggggccacgagt

SEQ ID NO: 2322 - RNA, 20 nt, synthetic construct
  source 1..20: mol_type = other RNA
accaatgtacgcattgagta

SEQ ID NO: 2323 - RNA, 20 nt, synthetic construct
  source 1..20: mol_type = other RNA
accacatccggaaaggccag

SEQ ID NO: 2324 - RNA, 20 nt, synthetic construct
  source 1..20: mol_type = other RNA
accactcgtggccccaccaa

SEQ ID NO: 2325 - RNA, 20 nt, synthetic construct
  source 1..20: mol_type = other RNA
accagacggttgatgacaag

SEQ ID NO: 2326 - RNA, 20 nt, synthetic construct
  source 1..20: mol_type = other RNA
accagccactgctgtacacc

SEQ ID NO: 2327 - RNA, 20 nt, synthetic construct
  source 1..20: mol_type = other RNA
accagcctaggcaagtgcag

SEQ ID NO: 2328 - RNA, 20 nt, synthetic construct
  source 1..20: mol_type = other RNA
accagttttaggtgtacagc

SEQ ID NO: 2329 - RNA, 20 nt, synthetic construct
  source 1..20: mol_type = other RNA
acccagcactgcctgctcct

SEQ ID NO: 2330 - RNA, 20 nt, synthetic construct
  source 1..20: mol_type = other RNA
accccaataccagcctaggc

SEQ ID NO: 2331 - RNA, 20 nt, synthetic construct
  source 1..20: mol_type = other RNA
accccagctacctgttcacg

SEQ ID NO: 2332 - RNA, 20 nt, synthetic construct
  source 1..20: mol_type = other RNA
accccggccctgcctatgcc

SEQ ID NO: 2333 - RNA, 20 nt, synthetic construct
  source 1..20: mol_type = other RNA
accccttccagctctgactg

SEQ ID NO: 2334 - RNA, 20 nt, synthetic construct
  source 1..20: mol_type = other RNA
acccgaagcgacagccccga

SEQ ID NO: 2335 - RNA, 20 nt, synthetic construct
  source 1..20: mol_type = other RNA
accgtctggtggccgacgtg

SEQ ID NO: 2336 - RNA, 20 nt, synthetic construct
  source 1..20: mol_type = other RNA
acctaaaactggtgcagccc

SEQ ID NO: 2337 - RNA, 20 nt, synthetic construct
  source 1..20: mol_type = other RNA
acctccgacagtaccccttc

SEQ ID NO: 2338 - RNA, 20 nt, synthetic construct
  source 1..20: mol_type = other RNA
acctgcagaagatgccagaa

SEQ ID NO: 2339 - RNA, 20 nt, synthetic construct
  source 1..20: mol_type = other RNA
acctgtgccgccttgtcatc

SEQ ID NO: 2340 - RNA, 20 nt, synthetic construct
  source 1..20: mol_type = other RNA
acctgttcacgctgtcagtg

SEQ ID NO: 2341 - RNA, 20 nt, synthetic construct
  source 1..20: mol_type = other RNA
acgagtggttttcactgaca

SEQ ID NO: 2342 - RNA, 20 nt, synthetic construct
  source 1..20: mol_type = other RNA
acgcaccccagctacctgtt

SEQ ID NO: 2343 - RNA, 20 nt, synthetic construct
  source 1..20: mol_type = other RNA
acgcagaagcagtgcccgca

SEQ ID NO: 2344 - RNA, 20 nt, synthetic construct
  source 1..20: mol_type = other RNA
acgcatcctggcctttccgg

SEQ ID NO: 2345 - RNA, 20 nt, synthetic construct
  source 1..20: mol_type = other RNA
acgcattgagtatgccgact

SEQ ID NO: 2346 - RNA, 20 nt, synthetic construct
  source 1..20: mol_type = other RNA
acgctgtcagtgaaaaccac

SEQ ID NO: 2347 - RNA, 20 nt, synthetic construct
  source 1..20: mol_type = other RNA
acggaagctggagtcggcat

SEQ ID NO: 2348 - RNA, 20 nt, synthetic construct
  source 1..20: mol_type = other RNA
acggccagcgaggcccgaca

SEQ ID NO: 2349 - RNA, 20 nt, synthetic construct
  source 1..20: mol_type = other RNA
acggggcaatctgcccaccc

SEQ ID NO: 2350 - RNA, 20 nt, synthetic construct
  source 1..20: mol_type = other RNA
acggttgatgacaaggcggc

SEQ ID NO: 2351 - RNA, 20 nt, synthetic construct
  source 1..20: mol_type = other RNA
acgtactaagaacgtgcctt

SEQ ID NO: 2352 - RNA, 20 nt, synthetic construct
  source 1..20: mol_type = other RNA
acgtcggccaccagacggtt

SEQ ID NO: 2353 - RNA, 20 nt, synthetic construct
  source 1..20: mol_type = other RNA
acgtgacagcacgcacccca

SEQ ID NO: 2354 - RNA, 20 nt, synthetic construct
  source 1..20: mol_type = other RNA
acgtgccttctggcatcttc

SEQ ID NO: 2355 - RNA, 20 nt, synthetic construct
  source 1..20: mol_type = other RNA
acgtggactgcctgccactg

SEQ ID NO: 2356 - RNA, 20 nt, synthetic construct
  source 1..20: mol_type = other RNA
acgttcttagtacgtgacag

SEQ ID NO: 2357 - RNA, 20 nt, synthetic construct
  source 1..20: mol_type = other RNA
actaagaacgtgccttctgg

SEQ ID NO: 2358 - RNA, 20 nt, synthetic construct
  source 1..20: mol_type = other RNA
actacctccgacagtacccc

SEQ ID NO: 2359 - RNA, 20 nt, synthetic construct
  source 1..20: mol_type = other RNA
actaggcgcatcctccttag

SEQ ID NO: 2360 - RNA, 20 nt, synthetic construct
  source 1..20: mol_type = other RNA
actatgtggcctcctgcact

SEQ ID NO: 2361 - RNA, 20 nt, synthetic construct
  source 1..20: mol_type = other RNA
actcaatgcgtacattggtg

SEQ ID NO: 2362 - RNA, 20 nt, synthetic construct
  source 1..20: mol_type = other RNA
actccaactgcttgtccagg

SEQ ID NO: 2363 - RNA, 20 nt, synthetic construct
  source 1..20: mol_type = other RNA
actccagcttccgtctggac

SEQ ID NO: 2364 - RNA, 20 nt, synthetic construct
  source 1..20: mol_type = other RNA
actcgtggccccaccaatgt

SEQ ID NO: 2365 - RNA, 20 nt, synthetic construct
  source 1..20: mol_type = other RNA
actgacagcgtgaacaggta

SEQ ID NO: 2366 - RNA, 20 nt, synthetic construct
  source 1..20: mol_type = other RNA
actgccccggcgcatggccg

SEQ ID NO: 2367 - RNA, 20 nt, synthetic construct
  source 1..20: mol_type = other RNA
actgcctgccactgccccgg

SEQ ID NO: 2368 - RNA, 20 nt, synthetic construct
  source 1..20: mol_type = other RNA
actgcctgctcctccaccag

SEQ ID NO: 2369 - RNA, 20 nt, synthetic construct
  source 1..20: mol_type = other RNA
actgctgatacccgaagcga

SEQ ID NO: 2370 - RNA, 20 nt, synthetic construct
  source 1..20: mol_type = other RNA
actgctgtacacctaaaact

SEQ ID NO: 2371 - RNA, 20 nt, synthetic construct
  source 1..20: mol_type = other RNA
actgcttctgcgtacaaagg

SEQ ID NO: 2372 - RNA, 20 nt, synthetic construct
  source 1..20: mol_type = other RNA
actgcttgtccaggccacgc

SEQ ID NO: 2373 - RNA, 20 nt, synthetic construct
  source 1..20: mol_type = other RNA
actggtgcagccctttgtac

SEQ ID NO: 2374 - RNA, 20 nt, synthetic construct
  source 1..20: mol_type = other RNA
actgtacggggcaatctgcc

SEQ ID NO: 2375 - RNA, 20 nt, synthetic construct
  source 1..20: mol_type = other RNA
actgtcggaggtagtcggcc

SEQ ID NO: 2376 - RNA, 20 nt, synthetic construct
  source 1..20: mol_type = other RNA
acttgcctaggctggtattg

SEQ ID NO: 2377 - RNA, 20 nt, synthetic construct
  source 1..20: mol_type = other RNA
agaacgtgccttctggcatc

SEQ ID NO: 2378 - RNA, 20 nt, synthetic construct
  source 1..20: mol_type = other RNA
agaagatgccagaaggcacg

SEQ ID NO: 2379 - RNA, 20 nt, synthetic construct
  source 1..20: mol_type = other RNA
agaagcagtgcccgcagcct

SEQ ID NO: 2380 - RNA, 20 nt, synthetic construct
  source 1..20: mol_type = other RNA
agaaggcacgttcttagtac

SEQ ID NO: 2381 - RNA, 20 nt, synthetic construct
  source 1..20: mol_type = other RNA
agacggaagctggagtcggc

SEQ ID NO: 2382 - RNA, 20 nt, synthetic construct
  source 1..20: mol_type = other RNA
agacggttgatgacaaggcg

SEQ ID NO: 2383 - RNA, 20 nt, synthetic construct
  source 1..20: mol_type = other RNA
agagctggaaggggtactgt

SEQ ID NO: 2384 - RNA, 20 nt, synthetic construct
  source 1..20: mol_type = other RNA
agatgccagaaggcacgttc

SEQ ID NO: 2385 - RNA, 20 nt, synthetic construct
  source 1..20: mol_type = other RNA
agattgccccgtacagtcag

SEQ ID NO: 2386 - RNA, 20 nt, synthetic construct
  source 1..20: mol_type = other RNA
agcacgcaccccagctacct

SEQ ID NO: 2387 - RNA, 20 nt, synthetic construct
  source 1..20: mol_type = other RNA
agcactatgtggcctcctgc

SEQ ID NO: 2388 - RNA, 20 nt, synthetic construct
  source 1..20: mol_type = other RNA
agcactgcctgctcctccac

SEQ ID NO: 2389 - RNA, 20 nt, synthetic construct
  source 1..20: mol_type = other RNA
agcaggatcggggctgtcgc

SEQ ID NO: 2390 - RNA, 20 nt, synthetic construct
  source 1..20: mol_type = other RNA
agcaggcagtgctgggtcac

SEQ ID NO: 2391 - RNA, 20 nt, synthetic construct
  source 1..20: mol_type = other RNA
agcagtgcaggaggccacat

SEQ ID NO: 2392 - RNA, 20 nt, synthetic construct
  source 1..20: mol_type = other RNA
agcagtgcccgcagcctgca

SEQ ID NO: 2393 - RNA, 20 nt, synthetic construct
  source 1..20: mol_type = other RNA
agcagtggctggtggaggag

SEQ ID NO: 2394 - RNA, 20 nt, synthetic construct
  source 1..20: mol_type = other RNA
agcagttggagtccagacgg

SEQ ID NO: 2395 - RNA, 20 nt, synthetic construct
  source 1..20: mol_type = other RNA
agccactgctgtacacctaa

SEQ ID NO: 2396 - RNA, 20 nt, synthetic construct
  source 1..20: mol_type = other RNA
agccccgatcctgctcccac

SEQ ID NO: 2397 - RNA, 20 nt, synthetic construct
  source 1..20: mol_type = other RNA
agccctttgtacgcagaagc

SEQ ID NO: 2398 - RNA, 20 nt, synthetic construct
  source 1..20: mol_type = other RNA
agcctaggcaagtgcagagg

SEQ ID NO: 2399 - RNA, 20 nt, synthetic construct
  source 1..20: mol_type = other RNA
agcctgcaacacctgtgccg

SEQ ID NO: 2400 - RNA, 20 nt, synthetic construct
  source 1..20: mol_type = other RNA
agccttgtgcagcactatgt

SEQ ID NO: 2401 - RNA, 20 nt, synthetic construct
  source 1..20: mol_type = other RNA
agcgacagccccgatcctgc

SEQ ID NO: 2402 - RNA, 20 nt, synthetic construct
  source 1..20: mol_type = other RNA
agcgaggcccgacaacacct

SEQ ID NO: 2403 - RNA, 20 nt, synthetic construct
  source 1..20: mol_type = other RNA
agcgtgaacaggtagctggg

SEQ ID NO: 2404 - RNA, 20 nt, synthetic construct
  source 1..20: mol_type = other RNA
agctacctgttcacgctgtc

SEQ ID NO: 2405 - RNA, 20 nt, synthetic construct
  source 1..20: mol_type = other RNA
agctctgactgtacggggca

SEQ ID NO: 2406 - RNA, 20 nt, synthetic construct
  source 1..20: mol_type = other RNA
agctggaaggggtactgtcg

SEQ ID NO: 2407 - RNA, 20 nt, synthetic construct
  source 1..20: mol_type = other RNA
agctggagtcggcatactca

SEQ ID NO: 2408 - RNA, 20 nt, synthetic construct
  source 1..20: mol_type = other RNA
agctggggtgcgtgctgtca

SEQ ID NO: 2409 - RNA, 20 nt, synthetic construct
  source 1..20: mol_type = other RNA
agcttccgtctggactccaa

SEQ ID NO: 2410 - RNA, 20 nt, synthetic construct
  source 1..20: mol_type = other RNA
aggagcaggcagtgctgggt

SEQ ID NO: 2411 - RNA, 20 nt, synthetic construct
  source 1..20: mol_type = other RNA
aggaggatgcgcctagtgac

SEQ ID NO: 2412 - RNA, 20 nt, synthetic construct
  source 1..20: mol_type = other RNA
aggaggccacatagtgctgc

SEQ ID NO: 2413 - RNA, 20 nt, synthetic construct
  source 1..20: mol_type = other RNA
aggatcggggctgtcgcttc

SEQ ID NO: 2414 - RNA, 20 nt, synthetic construct
  source 1..20: mol_type = other RNA
aggatgcgcctagtgaccca

SEQ ID NO: 2415 - RNA, 20 nt, synthetic construct
  source 1..20: mol_type = other RNA
aggatgcgtggcctggacaa

SEQ ID NO: 2416 - RNA, 20 nt, synthetic construct
  source 1..20: mol_type = other RNA
aggcaagtgcagagggggcc

SEQ ID NO: 2417 - RNA, 20 nt, synthetic construct
  source 1..20: mol_type = other RNA
aggcacgttcttagtacgtg

SEQ ID NO: 2418 - RNA, 20 nt, synthetic construct
  source 1..20: mol_type = other RNA
aggcagggccggggtgggag

SEQ ID NO: 2419 - RNA, 20 nt, synthetic construct
  source 1..20: mol_type = other RNA
aggcagtccacgtcggccac

SEQ ID NO: 2420 - RNA, 20 nt, synthetic construct
  source 1..20: mol_type = other RNA
aggcagtgctgggtcactag

SEQ ID NO: 2421 - RNA, 20 nt, synthetic construct
  source 1..20: mol_type = other RNA
aggcataggcagggccgggg

SEQ ID NO: 2422 - RNA, 20 nt, synthetic construct
  source 1..20: mol_type = other RNA
aggccacatagtgctgcaca

SEQ ID NO: 2423 - RNA, 20 nt, synthetic construct
  source 1..20: mol_type = other RNA
aggccacgcatcctggcctt

SEQ ID NO: 2424 - RNA, 20 nt, synthetic construct
  source 1..20: mol_type = other RNA
aggccaggatgcgtggcctg

SEQ ID NO: 2425 - RNA, 20 nt, synthetic construct
  source 1..20: mol_type = other RNA
aggcccgacaacacctgcag

SEQ ID NO: 2426 - RNA, 20 nt, synthetic construct
  source 1..20: mol_type = other RNA
aggcgcatcctccttaggca

SEQ ID NO: 2427 - RNA, 20 nt, synthetic construct
  source 1..20: mol_type = other RNA
aggcggcacaggtgttgcag

SEQ ID NO: 2428 - RNA, 20 nt, synthetic construct
  source 1..20: mol_type = other RNA
aggctgaccacatccggaaa

SEQ ID NO: 2429 - RNA, 20 nt, synthetic construct
  source 1..20: mol_type = other RNA
aggctgcgggcactgcttct

SEQ ID NO: 2430 - RNA, 20 nt, synthetic construct
  source 1..20: mol_type = other RNA
aggctggtattggggttcca

SEQ ID NO: 2431 - RNA, 20 nt, synthetic construct
  source 1..20: mol_type = other RNA
agggccggggtgggagcagg

SEQ ID NO: 2432 - RNA, 20 nt, synthetic construct
  source 1..20: mol_type = other RNA
agggctgcaccagttttagg

SEQ ID NO: 2433 - RNA, 20 nt, synthetic construct
  source 1..20: mol_type = other RNA
aggggtactgtcggaggtag

SEQ ID NO: 2434 - RNA, 20 nt, synthetic construct
  source 1..20: mol_type = other RNA
agggtgggcagattgccccg

SEQ ID NO: 2435 - RNA, 20 nt, synthetic construct
  source 1..20: mol_type = other RNA
aggtagctggggtgcgtgct

SEQ ID NO: 2436 - RNA, 20 nt, synthetic construct
  source 1..20: mol_type = other RNA
aggtagtcggccatgcgccg

SEQ ID NO: 2437 - RNA, 20 nt, synthetic construct
  source 1..20: mol_type = other RNA
aggtgtacagcagtggctgg

SEQ ID NO: 2438 - RNA, 20 nt, synthetic construct
  source 1..20: mol_type = other RNA
aggtgttgcaggctgcgggc

SEQ ID NO: 2439 - RNA, 20 nt, synthetic construct
  source 1..20: mol_type = other RNA
aggtgttgtcgggcctcgct

SEQ ID NO: 2440 - RNA, 20 nt, synthetic construct
  source 1..20: mol_type = other RNA
agtaccccttccagctctga

SEQ ID NO: 2441 - RNA, 20 nt, synthetic construct
  source 1..20: mol_type = other RNA
agtacgtgacagcacgcacc

SEQ ID NO: 2442 - RNA, 20 nt, synthetic construct
  source 1..20: mol_type = other RNA
agtatgccgactccagcttc

SEQ ID NO: 2443 - RNA, 20 nt, synthetic construct
  source 1..20: mol_type = other RNA
agtcagagctggaaggggta

SEQ ID NO: 2444 - RNA, 20 nt, synthetic construct
  source 1..20: mol_type = other RNA
agtccacgtcggccaccaga

SEQ ID NO: 2445 - RNA, 20 nt, synthetic construct
  source 1..20: mol_type = other RNA
agtccagacggaagctggag

SEQ ID NO: 2446 - RNA, 20 nt, synthetic construct
  source 1..20: mol_type = other RNA
agtcggcatactcaatgcgt

SEQ ID NO: 2447 - RNA, 20 nt, synthetic construct
  source 1..20: mol_type = other RNA
agtcggccatgcgccggggc

SEQ ID NO: 2448 - RNA, 20 nt, synthetic construct
  source 1..20: mol_type = other RNA
agtgaaaaccactcgtggcc

SEQ ID NO: 2449 - RNA, 20 nt, synthetic construct
  source 1..20: mol_type = other RNA
agtgacccagcactgcctgc

SEQ ID NO: 2450 - RNA, 20 nt, synthetic construct
  source 1..20: mol_type = other RNA
agtgcaggaggccacatagt

SEQ ID NO: 2451 - RNA, 20 nt, synthetic construct
  source 1..20: mol_type = other RNA
agtgcccgcagcctgcaaca

SEQ ID NO: 2452 - RNA, 20 nt, synthetic construct
  source 1..20: mol_type = other RNA
agtgctgcacaaggctgacc

SEQ ID NO: 2453 - RNA, 20 nt, synthetic construct
  source 1..20: mol_type = other RNA
agtgctgggtcactaggcgc

SEQ ID NO: 2454 - RNA, 20 nt, synthetic construct
  source 1..20: mol_type = other RNA
agtggcaggcagtccacgtc

SEQ ID NO: 2455 - RNA, 20 nt, synthetic construct
  source 1..20: mol_type = other RNA
agtggctggtggaggagcag

SEQ ID NO: 2456 - RNA, 20 nt, synthetic construct
  source 1..20: mol_type = other RNA
agtggttttcactgacagcg

SEQ ID NO: 2457 - RNA, 20 nt, synthetic construct
  source 1..20: mol_type = other RNA
agttggagtccagacggaag

SEQ ID NO: 2458 - RNA, 20 nt, synthetic construct
  source 1..20: mol_type = other RNA
agttttaggtgtacagcagt

SEQ ID NO: 2459 - RNA, 20 nt, synthetic construct
  source 1..20: mol_type = other RNA
ataccagcctaggcaagtgc

SEQ ID NO: 2460 - RNA, 20 nt, synthetic construct
  source 1..20: mol_type = other RNA
atacccgaagcgacagcccc

SEQ ID NO: 2461 - RNA, 20 nt, synthetic construct
  source 1..20: mol_type = other RNA
atactcaatgcgtacattgg

SEQ ID NO: 2462 - RNA, 20 nt, synthetic construct
  source 1..20: mol_type = other RNA
ataggcagggccggggtggg

SEQ ID NO: 2463 - RNA, 20 nt, synthetic construct
  source 1..20: mol_type = other RNA
atagtgctgcacaaggctga

SEQ ID NO: 2464 - RNA, 20 nt, synthetic construct
  source 1..20: mol_type = other RNA
atcaaccgtctggtggccga

SEQ ID NO: 2465 - RNA, 20 nt, synthetic construct
  source 1..20: mol_type = other RNA
atcagcagtgcaggaggcca

SEQ ID NO: 2466 - RNA, 20 nt, synthetic construct
  source 1..20: mol_type = other RNA
atccggaaaggccaggatgc

SEQ ID NO: 2467 - RNA, 20 nt, synthetic construct
  source 1..20: mol_type = other RNA
atcctccttaggcataggca

SEQ ID NO: 2468 - RNA, 20 nt, synthetic construct
  source 1..20: mol_type = other RNA
atcctgctcccaccccggcc

SEQ ID NO: 2469 - RNA, 20 nt, synthetic construct
  source 1..20: mol_type = other RNA
atcctggcctttccggatgt

SEQ ID NO: 2470 - RNA, 20 nt, synthetic construct
  source 1..20: mol_type = other RNA
atcggggctgtcgcttcggg

SEQ ID NO: 2471 - RNA, 20 nt, synthetic construct
  source 1..20: mol_type = other RNA
atcttctgcaggtgttgtcg

SEQ ID NO: 2472 - RNA, 20 nt, synthetic construct
  source 1..20: mol_type = other RNA
atgacaaggcggcacaggtg

SEQ ID NO: 2473 - RNA, 20 nt, synthetic construct
  source 1..20: mol_type = other RNA
atgccagaaggcacgttctt

SEQ ID NO: 2474 - RNA, 20 nt, synthetic construct
  source 1..20: mol_type = other RNA
atgccgactccagcttccgt

SEQ ID NO: 2475 - RNA, 20 nt, synthetic construct
  source 1..20: mol_type = other RNA
atgcctaaggaggatgcgcc

SEQ ID NO: 2476 - RNA, 20 nt, synthetic construct
  source 1..20: mol_type = other RNA
atgcgccggggcagtggcag

SEQ ID NO: 2477 - RNA, 20 nt, synthetic construct
  source 1..20: mol_type = other RNA
atgcgcctagtgacccagca

SEQ ID NO: 2478 - RNA, 20 nt, synthetic construct
  source 1..20: mol_type = other RNA
atgcgtacattggtggggcc

SEQ ID NO: 2479 - RNA, 20 nt, synthetic construct
  source 1..20: mol_type = other RNA
atgcgtggcctggacaagca

SEQ ID NO: 2480 - RNA, 20 nt, synthetic construct
  source 1..20: mol_type = other RNA
atggaaccccaataccagcc

SEQ ID NO: 2481 - RNA, 20 nt, synthetic construct
  source 1..20: mol_type = other RNA
atggccgactacctccgaca

SEQ ID NO: 2482 - RNA, 20 nt, synthetic construct
  source 1..20: mol_type = other RNA
atgtacgcattgagtatgcc

SEQ ID NO: 2483 - RNA, 20 nt, synthetic construct
  source 1..20: mol_type = other RNA
atgtcccttggccccctctg

SEQ ID NO: 2484 - RNA, 20 nt, synthetic construct
  source 1..20: mol_type = other RNA
atgtggcctcctgcactgct

SEQ ID NO: 2485 - RNA, 20 nt, synthetic construct
  source 1..20: mol_type = other RNA
atgtggtcagccttgtgcag

SEQ ID NO: 2486 - RNA, 20 nt, synthetic construct
  source 1..20: mol_type = other RNA
attacggccagcgaggcccg

SEQ ID NO: 2487 - RNA, 20 nt, synthetic construct
  source 1..20: mol_type = other RNA
attgagtatgccgactccag

SEQ ID NO: 2488 - RNA, 20 nt, synthetic construct
  source 1..20: mol_type = other RNA
attgccccgtacagtcagag

SEQ ID NO: 2489 - RNA, 20 nt, synthetic construct
  source 1..20: mol_type = other RNA
attggggttccattacggcc

SEQ ID NO: 2490 - RNA, 20 nt, synthetic construct
  source 1..20: mol_type = other RNA
attggtggggccacgagtgg

SEQ ID NO: 2491 - RNA, 20 nt, synthetic construct
  source 1..20: mol_type = other RNA
caaagggctgcaccagtttt

SEQ ID NO: 2492 - RNA, 20 nt, synthetic construct
  source 1..20: mol_type = other RNA
caacacctgcagaagatgcc

SEQ ID NO: 2493 - RNA, 20 nt, synthetic construct
  source 1..20: mol_type = other RNA
caacacctgtgccgccttgt

SEQ ID NO: 2494 - RNA, 20 nt, synthetic construct
  source 1..20: mol_type = other RNA
caaccgtctggtggccgacg

SEQ ID NO: 2495 - RNA, 20 nt, synthetic construct
  source 1..20: mol_type = other RNA
caactgcttgtccaggccac

SEQ ID NO: 2496 - RNA, 20 nt, synthetic construct
  source 1..20: mol_type = other RNA
caagcagttggagtccagac

SEQ ID NO: 2497 - RNA, 20 nt, synthetic construct
  source 1..20: mol_type = other RNA
caaggcggcacaggtgttgc

SEQ ID NO: 2498 - RNA, 20 nt, synthetic construct
  source 1..20: mol_type = other RNA
caaggctgaccacatccgga

SEQ ID NO: 2499 - RNA, 20 nt, synthetic construct
  source 1..20: mol_type = other RNA
caataccagcctaggcaagt

SEQ ID NO: 2500 - RNA, 20 nt, synthetic construct
  source 1..20: mol_type = other RNA
caatgcgtacattggtgggg

SEQ ID NO: 2501 - RNA, 20 nt, synthetic construct
  source 1..20: mol_type = other RNA
caatgtacgcattgagtatg

SEQ ID NO: 2502 - RNA, 20 nt, synthetic construct
  source 1..20: mol_type = other RNA
cacaaggctgaccacatccg

SEQ ID NO: 2503 - RNA, 20 nt, synthetic construct
  source 1..20: mol_type = other RNA
cacaggtgttgcaggctgcg

SEQ ID NO: 2504 - RNA, 20 nt, synthetic construct
  source 1..20: mol_type = other RNA
cacatagtgctgcacaaggc

SEQ ID NO: 2505 - RNA, 20 nt, synthetic construct
  source 1..20: mol_type = other RNA
cacatccggaaaggccagga

SEQ ID NO: 2506 - RNA, 20 nt, synthetic construct
  source 1..20: mol_type = other RNA
caccaatgtacgcattgagt

SEQ ID NO: 2507 - RNA, 20 nt, synthetic construct
  source 1..20: mol_type = other RNA
caccagacggttgatgacaa

SEQ ID NO: 2508 - RNA, 20 nt, synthetic construct
  source 1..20: mol_type = other RNA
caccagccactgctgtacac

SEQ ID NO: 2509 - RNA, 20 nt, synthetic construct
  source 1..20: mol_type = other RNA
caccagttttaggtgtacag

SEQ ID NO: 2510 - RNA, 20 nt, synthetic construct
  source 1..20: mol_type = other RNA
caccccagctacctgttcac

SEQ ID NO: 2511 - RNA, 20 nt, synthetic construct
  source 1..20: mol_type = other RNA
caccccggccctgcctatgc

SEQ ID NO: 2512 - RNA, 20 nt, synthetic construct
  source 1..20: mol_type = other RNA
cacctaaaactggtgcagcc

SEQ ID NO: 2513 - RNA, 20 nt, synthetic construct
  source 1..20: mol_type = other RNA
cacctgcagaagatgccaga

SEQ ID NO: 2514 - RNA, 20 nt, synthetic construct
  source 1..20: mol_type = other RNA
cacctgtgccgccttgtcat

SEQ ID NO: 2515 - RNA, 20 nt, synthetic construct
  source 1..20: mol_type = other RNA
cacgagtggttttcactgac

SEQ ID NO: 2516 - RNA, 20 nt, synthetic construct
  source 1..20: mol_type = other RNA
cacgcaccccagctacctgt

SEQ ID NO: 2517 - RNA, 20 nt, synthetic construct
  source 1..20: mol_type = other RNA
cacgcatcctggcctttccg

SEQ ID NO: 2518 - RNA, 20 nt, synthetic construct
  source 1..20: mol_type = other RNA
cacgctgtcagtgaaaacca

SEQ ID NO: 2519 - RNA, 20 nt, synthetic construct
  source 1..20: mol_type = other RNA
cacgtactaagaacgtgcct

SEQ ID NO: 2520 - RNA, 20 nt, synthetic construct
  source 1..20: mol_type = other RNA
cacgtcggccaccagacggt

SEQ ID NO: 2521 - RNA, 20 nt, synthetic construct
  source 1..20: mol_type = other RNA
cacgttcttagtacgtgaca

SEQ ID NO: 2522 - RNA, 20 nt, synthetic construct
  source 1..20: mol_type = other RNA
cactaggcgcatcctcctta

SEQ ID NO: 2523 - RNA, 20 nt, synthetic construct
  source 1..20: mol_type = other RNA
cactatgtggcctcctgcac

SEQ ID NO: 2524 - RNA, 20 nt, synthetic construct
  source 1..20: mol_type = other RNA
cactcgtggccccaccaatg

SEQ ID NO: 2525 - RNA, 20 nt, synthetic construct
  source 1..20: mol_type = other RNA
cactgacagcgtgaacaggt

SEQ ID NO: 2526 - RNA, 20 nt, synthetic construct
  source 1..20: mol_type = other RNA
cactgccccggcgcatggcc

SEQ ID NO: 2527 - RNA, 20 nt, synthetic construct
  source 1..20: mol_type = other RNA
cactgcctgctcctccacca

SEQ ID NO: 2528 - RNA, 20 nt, synthetic construct
  source 1..20: mol_type = other RNA
cactgctgatacccgaagcg

SEQ ID NO: 2529 - RNA, 20 nt, synthetic construct
  source 1..20: mol_type = other RNA
cactgctgtacacctaaaac

SEQ ID NO: 2530 - RNA, 20 nt, synthetic construct
  source 1..20: mol_type = other RNA
cactgcttctgcgtacaaag

SEQ ID NO: 2531 - RNA, 20 nt, synthetic construct
  source 1..20: mol_type = other RNA
cacttgcctaggctggtatt

SEQ ID NO: 2532 - RNA, 20 nt, synthetic construct
  source 1..20: mol_type = other RNA
cagaagatgccagaaggcac

SEQ ID NO: 2533 - RNA, 20 nt, synthetic construct
  source 1..20: mol_type = other RNA
cagaagcagtgcccgcagcc

SEQ ID NO: 2534 - RNA, 20 nt, synthetic construct
  source 1..20: mol_type = other RNA
cagaaggcacgttcttagta

SEQ ID NO: 2535 - RNA, 20 nt, synthetic construct
  source 1..20: mol_type = other RNA
cagacggaagctggagtcgg

SEQ ID NO: 2536 - RNA, 20 nt, synthetic construct
  source 1..20: mol_type = other RNA
cagacggttgatgacaaggc

SEQ ID NO: 2537 - RNA, 20 nt, synthetic construct
  source 1..20: mol_type = other RNA
cagagctggaaggggtactg

SEQ ID NO: 2538 - RNA, 20 nt, synthetic construct
  source 1..20: mol_type = other RNA
cagattgccccgtacagtca

SEQ ID NO: 2539 - RNA, 20 nt, synthetic construct
  source 1..20: mol_type = other RNA
cagcacgcaccccagctacc

SEQ ID NO: 2540 - RNA, 20 nt, synthetic construct
  source 1..20: mol_type = other RNA
cagcactatgtggcctcctg

SEQ ID NO: 2541 - RNA, 20 nt, synthetic construct
  source 1..20: mol_type = other RNA
cagcactgcctgctcctcca

SEQ ID NO: 2542 - RNA, 20 nt, synthetic construct
  source 1..20: mol_type = other RNA
cagcagtgcaggaggccaca

SEQ ID NO: 2543 - RNA, 20 nt, synthetic construct
  source 1..20: mol_type = other RNA
cagcagtggctggtggagga

SEQ ID NO: 2544 - RNA, 20 nt, synthetic construct
  source 1..20: mol_type = other RNA
cagccactgctgtacaccta

SEQ ID NO: 2545 - RNA, 20 nt, synthetic construct
  source 1..20: mol_type = other RNA
cagccccgatcctgctccca

SEQ ID NO: 2546 - RNA, 20 nt, synthetic construct
  source 1..20: mol_type = other RNA
cagccctttgtacgcagaag

SEQ ID NO: 2547 - RNA, 20 nt, synthetic construct
  source 1..20: mol_type = other RNA
cagcctaggcaagtgcagag

SEQ ID NO: 2548 - RNA, 20 nt, synthetic construct
  source 1..20: mol_type = other RNA
cagcctgcaacacctgtgcc

SEQ ID NO: 2549 - RNA, 20 nt, synthetic construct
  source 1..20: mol_type = other RNA
cagccttgtgcagcactatg

SEQ ID NO: 2550 - RNA, 20 nt, synthetic construct
  source 1..20: mol_type = other RNA
cagcgaggcccgacaacacc

SEQ ID NO: 2551 - RNA, 20 nt, synthetic construct
  source 1..20: mol_type = other RNA
cagcgtgaacaggtagctgg

SEQ ID NO: 2552 - RNA, 20 nt, synthetic construct
  source 1..20: mol_type = other RNA
cagctacctgttcacgctgt

SEQ ID NO: 2553 - RNA, 20 nt, synthetic construct
  source 1..20: mol_type = other RNA
cagctctgactgtacggggc

SEQ ID NO: 2554 - RNA, 20 nt, synthetic construct
  source 1..20: mol_type = other RNA
cagcttccgtctggactcca

SEQ ID NO: 2555 - RNA, 20 nt, synthetic construct
  source 1..20: mol_type = other RNA
caggaggccacatagtgctg

SEQ ID NO: 2556 - RNA, 20 nt, synthetic construct
  source 1..20: mol_type = other RNA
caggatcggggctgtcgctt

SEQ ID NO: 2557 - RNA, 20 nt, synthetic construct
  source 1..20: mol_type = other RNA
caggatgcgtggcctggaca

SEQ ID NO: 2558 - RNA, 20 nt, synthetic construct
  source 1..20: mol_type = other RNA
caggcagtccacgtcggcca

SEQ ID NO: 2559 - RNA, 20 nt, synthetic construct
  source 1..20: mol_type = other RNA
caggcagtgctgggtcacta

SEQ ID NO: 2560 - RNA, 20 nt, synthetic construct
  source 1..20: mol_type = other RNA
caggccacgcatcctggcct

SEQ ID NO: 2561 - RNA, 20 nt, synthetic construct
  source 1..20: mol_type = other RNA
caggctgcgggcactgcttc

SEQ ID NO: 2562 - RNA, 20 nt, synthetic construct
  source 1..20: mol_type = other RNA
cagggccggggtgggagcag

SEQ ID NO: 2563 - RNA, 20 nt, synthetic construct
  source 1..20: mol_type = other RNA
caggtagctggggtgcgtgc

SEQ ID NO: 2564 - RNA, 20 nt, synthetic construct
  source 1..20: mol_type = other RNA
caggtgttgcaggctgcggg

SEQ ID NO: 2565 - RNA, 20 nt, synthetic construct
  source 1..20: mol_type = other RNA
caggtgttgtcgggcctcgc

SEQ ID NO: 2566 - RNA, 20 nt, synthetic construct
  source 1..20: mol_type = other RNA
cagtaccccttccagctctg

SEQ ID NO: 2567 - RNA, 20 nt, synthetic construct
  source 1..20: mol_type = other RNA
cagtcagagctggaaggggt

SEQ ID NO: 2568 - RNA, 20 nt, synthetic construct
  source 1..20: mol_type = other RNA
cagtccacgtcggccaccag

SEQ ID NO: 2569 - RNA, 20 nt, synthetic construct
  source 1..20: mol_type = other RNA
cagtgaaaaccactcgtggc

SEQ ID NO: 2570 - RNA, 20 nt, synthetic construct
  source 1..20: mol_type = other RNA
cagtgcaggaggccacatag

SEQ ID NO: 2571 - RNA, 20 nt, synthetic construct
  source 1..20: mol_type = other RNA
cagtgcccgcagcctgcaac

SEQ ID NO: 2572 - RNA, 20 nt, synthetic construct
  source 1..20: mol_type = other RNA
cagtgctgggtcactaggcg

SEQ ID NO: 2573 - RNA, 20 nt, synthetic construct
  source 1..20: mol_type = other RNA
cagtggcaggcagtccacgt

SEQ ID NO: 2574 - RNA, 20 nt, synthetic construct
  source 1..20: mol_type = other RNA
cagtggctggtggaggagca

SEQ ID NO: 2575 - RNA, 20 nt, synthetic construct
  source 1..20: mol_type = other RNA
cagttggagtccagacggaa

SEQ ID NO: 2576 - RNA, 20 nt, synthetic construct
  source 1..20: mol_type = other RNA
cagttttaggtgtacagcag

SEQ ID NO: 2577 - RNA, 20 nt, synthetic construct
  source 1..20: mol_type = other RNA
catactcaatgcgtacattg

SEQ ID NO: 2578 - RNA, 20 nt, synthetic construct
  source 1..20: mol_type = other RNA
cataggcagggccggggtgg

SEQ ID NO: 2579 - RNA, 20 nt, synthetic construct
  source 1..20: mol_type = other RNA
catagtgctgcacaaggctg

SEQ ID NO: 2580 - RNA, 20 nt, synthetic construct
  source 1..20: mol_type = other RNA
catcaaccgtctggtggccg

SEQ ID NO: 2581 - RNA, 20 nt, synthetic construct
  source 1..20: mol_type = other RNA
catccggaaaggccaggatg

SEQ ID NO: 2582 - RNA, 20 nt, synthetic construct
  source 1..20: mol_type = other RNA
catcctccttaggcataggc

SEQ ID NO: 2583 - RNA, 20 nt, synthetic construct
  source 1..20: mol_type = other RNA
catcctggcctttccggatg

SEQ ID NO: 2584 - RNA, 20 nt, synthetic construct
  source 1..20: mol_type = other RNA
catcttctgcaggtgttgtc

SEQ ID NO: 2585 - RNA, 20 nt, synthetic construct
  source 1..20: mol_type = other RNA
catgcgccggggcagtggca

SEQ ID NO: 2586 - RNA, 20 nt, synthetic construct
  source 1..20: mol_type = other RNA
catggccgactacctccgac

SEQ ID NO: 2587 - RNA, 20 nt, synthetic construct
  source 1..20: mol_type = other RNA
cattacggccagcgaggccc

SEQ ID NO: 2588 - RNA, 20 nt, synthetic construct
  source 1..20: mol_type = other RNA
cattgagtatgccgactcca

SEQ ID NO: 2589 - RNA, 20 nt, synthetic construct
  source 1..20: mol_type = other RNA
cattggtggggccacgagtg

SEQ ID NO: 2590 - RNA, 20 nt, synthetic construct
  source 1..20: mol_type = other RNA
ccaactgcttgtccaggcca

SEQ ID NO: 2591 - RNA, 20 nt, synthetic construct
  source 1..20: mol_type = other RNA
ccaataccagcctaggcaag

SEQ ID NO: 2592 - RNA, 20 nt, synthetic construct
  source 1..20: mol_type = other RNA
ccaatgtacgcattgagtat

SEQ ID NO: 2593 - RNA, 20 nt, synthetic construct
  source 1..20: mol_type = other RNA
ccacatagtgctgcacaagg

SEQ ID NO: 2594 - RNA, 20 nt, synthetic construct
  source 1..20: mol_type = other RNA
ccacatccggaaaggccagg

SEQ ID NO: 2595 - RNA, 20 nt, synthetic construct
  source 1..20: mol_type = other RNA
ccaccaatgtacgcattgag

SEQ ID NO: 2596 - RNA, 20 nt, synthetic construct
  source 1..20: mol_type = other RNA
ccaccagacggttgatgaca

SEQ ID NO: 2597 - RNA, 20 nt, synthetic construct
  source 1..20: mol_type = other RNA
ccaccagccactgctgtaca

SEQ ID NO: 2598 - RNA, 20 nt, synthetic construct
  source 1..20: mol_type = other RNA
ccaccccggccctgcctatg

SEQ ID NO: 2599 - RNA, 20 nt, synthetic construct
  source 1..20: mol_type = other RNA
ccacgagtggttttcactga

SEQ ID NO: 2600 - RNA, 20 nt, synthetic construct
  source 1..20: mol_type = other RNA
ccacgcatcctggcctttcc

SEQ ID NO: 2601 - RNA, 20 nt, synthetic construct
  source 1..20: mol_type = other RNA
ccacgtcggccaccagacgg

SEQ ID NO: 2602 - RNA, 20 nt, synthetic construct
  source 1..20: mol_type = other RNA
ccactcgtggccccaccaat

SEQ ID NO: 2603 - RNA, 20 nt, synthetic construct
  source 1..20: mol_type = other RNA
ccactgccccggcgcatggc

SEQ ID NO: 2604 - RNA, 20 nt, synthetic construct
  source 1..20: mol_type = other RNA
ccactgctgtacacctaaaa

SEQ ID NO: 2605 - RNA, 20 nt, synthetic construct
  source 1..20: mol_type = other RNA
ccagaaggcacgttcttagt

SEQ ID NO: 2606 - RNA, 20 nt, synthetic construct
  source 1..20: mol_type = other RNA
ccagacggaagctggagtcg

SEQ ID NO: 2607 - RNA, 20 nt, synthetic construct
  source 1..20: mol_type = other RNA
ccagacggttgatgacaagg

SEQ ID NO: 2608 - RNA, 20 nt, synthetic construct
  source 1..20: mol_type = other RNA
ccagcactgcctgctcctcc

SEQ ID NO: 2609 - RNA, 20 nt, synthetic construct
  source 1..20: mol_type = other RNA
ccagccactgctgtacacct

SEQ ID NO: 2610 - RNA, 20 nt, synthetic construct
  source 1..20: mol_type = other RNA
ccagcctaggcaagtgcaga

SEQ ID NO: 2611 - RNA, 20 nt, synthetic construct
  source 1..20: mol_type = other RNA
ccagcgaggcccgacaacac

SEQ ID NO: 2612 - RNA, 20 nt, synthetic construct
  source 1..20: mol_type = other RNA
ccagctacctgttcacgctg

SEQ ID NO: 2613 - RNA, 20 nt, synthetic construct
  source 1..20: mol_type = other RNA
ccagctctgactgtacgggg

SEQ ID NO: 2614 - RNA, 20 nt, synthetic construct
  source 1..20: mol_type = other RNA
ccagcttccgtctggactcc

SEQ ID NO: 2615 - RNA, 20 nt, synthetic construct
  source 1..20: mol_type = other RNA
ccaggatgcgtggcctggac

SEQ ID NO: 2616 - RNA, 20 nt, synthetic construct
  source 1..20: mol_type = other RNA
ccaggccacgcatcctggcc

SEQ ID NO: 2617 - RNA, 20 nt, synthetic construct
  source 1..20: mol_type = other RNA
ccagttttaggtgtacagca

SEQ ID NO: 2618 - RNA, 20 nt, synthetic construct
  source 1..20: mol_type = other RNA
ccatgcgccggggcagtggc

SEQ ID NO: 2619 - RNA, 20 nt, synthetic construct
  source 1..20: mol_type = other RNA
ccattacggccagcgaggcc

SEQ ID NO: 2620 - RNA, 20 nt, synthetic construct
  source 1..20: mol_type = other RNA
cccaataccagcctaggcaa

SEQ ID NO: 2621 - RNA, 20 nt, synthetic construct
  source 1..20: mol_type = other RNA
cccaccaatgtacgcattga

SEQ ID NO: 2622 - RNA, 20 nt, synthetic construct
  source 1..20: mol_type = other RNA
cccaccccggccctgcctat

SEQ ID NO: 2623 - RNA, 20 nt, synthetic construct
  source 1..20: mol_type = other RNA
cccagcactgcctgctcctc

SEQ ID NO: 2624 - RNA, 20 nt, synthetic construct
  source 1..20: mol_type = other RNA
cccagctacctgttcacgct

SEQ ID NO: 2625 - RNA, 20 nt, synthetic construct
  source 1..20: mol_type = other RNA
ccccaataccagcctaggca

SEQ ID NO: 2626 - RNA, 20 nt, synthetic construct
  source 1..20: mol_type = other RNA
ccccaccaatgtacgcattg

SEQ ID NO: 2627 - RNA, 20 nt, synthetic construct
  source 1..20: mol_type = other RNA
ccccagctacctgttcacgc

SEQ ID NO: 2628 - RNA, 20 nt, synthetic construct
  source 1..20: mol_type = other RNA
ccccctctgcacttgcctag

SEQ ID NO: 2629 - RNA, 20 nt, synthetic construct
  source 1..20: mol_type = other RNA
ccccgatcctgctcccaccc

SEQ ID NO: 2630 - RNA, 20 nt, synthetic construct
  source 1..20: mol_type = other RNA
ccccggccctgcctatgcct

SEQ ID NO: 2631 - RNA, 20 nt, synthetic construct
  source 1..20: mol_type = other RNA
ccccggcgcatggccgacta

SEQ ID NO: 2632 - RNA, 20 nt, synthetic construct
  source 1..20: mol_type = other RNA
ccccgtacagtcagagctgg

SEQ ID NO: 2633 - RNA, 20 nt, synthetic construct
  source 1..20: mol_type = other RNA
cccctctgcacttgcctagg

SEQ ID NO: 2634 - RNA, 20 nt, synthetic construct
  source 1..20: mol_type = other RNA
ccccttccagctctgactgt

SEQ ID NO: 2635 - RNA, 20 nt, synthetic construct
  source 1..20: mol_type = other RNA
cccgaagcgacagccccgat

SEQ ID NO: 2636 - RNA, 20 nt, synthetic construct
  source 1..20: mol_type = other RNA
cccgacaacacctgcagaag

SEQ ID NO: 2637 - RNA, 20 nt, synthetic construct
  source 1..20: mol_type = other RNA
cccgatcctgctcccacccc

SEQ ID NO: 2638 - RNA, 20 nt, synthetic construct
  source 1..20: mol_type = other RNA
cccgcagcctgcaacacctg

SEQ ID NO: 2639 - RNA, 20 nt, synthetic construct
  source 1..20: mol_type = other RNA
cccggccctgcctatgccta

SEQ ID NO: 2640 - RNA, 20 nt, synthetic construct
  source 1..20: mol_type = other RNA
cccggcgcatggccgactac

SEQ ID NO: 2641 - RNA, 20 nt, synthetic construct
  source 1..20: mol_type = other RNA
cccgtacagtcagagctgga

SEQ ID NO: 2642 - RNA, 20 nt, synthetic construct
  source 1..20: mol_type = other RNA
ccctctgcacttgcctaggc

SEQ ID NO: 2643 - RNA, 20 nt, synthetic construct
  source 1..20: mol_type = other RNA
ccctgcctatgcctaaggag

SEQ ID NO: 2644 - RNA, 20 nt, synthetic construct
  source 1..20: mol_type = other RNA
cccttccagctctgactgta

SEQ ID NO: 2645 - RNA, 20 nt, synthetic construct
  source 1..20: mol_type = other RNA
cccttggccccctctgcact

SEQ ID NO: 2646 - RNA, 20 nt, synthetic construct
  source 1..20: mol_type = other RNA
ccctttgtacgcagaagcag

SEQ ID NO: 2647 - RNA, 20 nt, synthetic construct
  source 1..20: mol_type = other RNA
ccgaagcgacagccccgatc

SEQ ID NO: 2648 - RNA, 20 nt, synthetic construct
  source 1..20: mol_type = other RNA
ccgacaacacctgcagaaga

SEQ ID NO: 2649 - RNA, 20 nt, synthetic construct
  source 1..20: mol_type = other RNA
ccgacagtaccccttccagc

SEQ ID NO: 2650 - RNA, 20 nt, synthetic construct
  source 1..20: mol_type = other RNA
ccgacgtggactgcctgcca

SEQ ID NO: 2651 - RNA, 20 nt, synthetic construct
  source 1..20: mol_type = other RNA
ccgactacctccgacagtac

SEQ ID NO: 2652 - RNA, 20 nt, synthetic construct
  source 1..20: mol_type = other RNA
ccgactccagcttccgtctg

SEQ ID NO: 2653 - RNA, 20 nt, synthetic construct
  source 1..20: mol_type = other RNA
ccgatcctgctcccaccccg

SEQ ID NO: 2654 - RNA, 20 nt, synthetic construct
  source 1..20: mol_type = other RNA
ccgcagcctgcaacacctgt

SEQ ID NO: 2655 - RNA, 20 nt, synthetic construct
  source 1..20: mol_type = other RNA
ccgccttgtcatcaaccgtc

SEQ ID NO: 2656 - RNA, 20 nt, synthetic construct
  source 1..20: mol_type = other RNA
ccggaaaggccaggatgcgt

SEQ ID NO: 2657 - RNA, 20 nt, synthetic construct
  source 1..20: mol_type = other RNA
ccggatgtggtcagccttgt

SEQ ID NO: 2658 - RNA, 20 nt, synthetic construct
  source 1..20: mol_type = other RNA
ccggccctgcctatgcctaa

SEQ ID NO: 2659 - RNA, 20 nt, synthetic construct
  source 1..20: mol_type = other RNA
ccggcgcatggccgactacc

SEQ ID NO: 2660 - RNA, 20 nt, synthetic construct
  source 1..20: mol_type = other RNA
ccggggcagtggcaggcagt

SEQ ID NO: 2661 - RNA, 20 nt, synthetic construct
  source 1..20: mol_type = other RNA
ccggggtgggagcaggatcg

SEQ ID NO: 2662 - RNA, 20 nt, synthetic construct
  source 1..20: mol_type = other RNA
ccgtaatggaaccccaatac

SEQ ID NO: 2663 - RNA, 20 nt, synthetic construct
  source 1..20: mol_type = other RNA
ccgtacagtcagagctggaa

SEQ ID NO: 2664 - RNA, 20 nt, synthetic construct
  source 1..20: mol_type = other RNA
ccgtctggactccaactgct

SEQ ID NO: 2665 - RNA, 20 nt, synthetic construct
  source 1..20: mol_type = other RNA
ccgtctggtggccgacgtgg

SEQ ID NO: 2666 - RNA, 20 nt, synthetic construct
  source 1..20: mol_type = other RNA
cctaaaactggtgcagccct

SEQ ID NO: 2667 - RNA, 20 nt, synthetic construct
  source 1..20: mol_type = other RNA
cctaaggaggatgcgcctag

SEQ ID NO: 2668 - RNA, 20 nt, synthetic construct
  source 1..20: mol_type = other RNA
cctaggcaagtgcagagggg

SEQ ID NO: 2669 - RNA, 20 nt, synthetic construct
  source 1..20: mol_type = other RNA
cctaggctggtattggggtt

SEQ ID NO: 2670 - RNA, 20 nt, synthetic construct
  source 1..20: mol_type = other RNA
cctagtgacccagcactgcc

SEQ ID NO: 2671 - RNA, 20 nt, synthetic construct
  source 1..20: mol_type = other RNA
cctatgcctaaggaggatgc

SEQ ID NO: 2672 - RNA, 20 nt, synthetic construct
  source 1..20: mol_type = other RNA
cctccaccagccactgctgt

SEQ ID NO: 2673 - RNA, 20 nt, synthetic construct
  source 1..20: mol_type = other RNA
cctccgacagtaccccttcc

SEQ ID NO: 2674 - RNA, 20 nt, synthetic construct
  source 1..20: mol_type = other RNA
cctcctgcactgctgatacc

SEQ ID NO: 2675 - RNA, 20 nt, synthetic construct
  source 1..20: mol_type = other RNA
cctccttaggcataggcagg

SEQ ID NO: 2676 - RNA, 20 nt, synthetic construct
  source 1..20: mol_type = other RNA
cctcgctggccgtaatggaa

SEQ ID NO: 2677 - RNA, 20 nt, synthetic construct
  source 1..20: mol_type = other RNA
cctctgcacttgcctaggct

SEQ ID NO: 2678 - RNA, 20 nt, synthetic construct
  source 1..20: mol_type = other RNA
cctgcaacacctgtgccgcc

SEQ ID NO: 2679 - RNA, 20 nt, synthetic construct
  source 1..20: mol_type = other RNA
cctgcactgctgatacccga

SEQ ID NO: 2680 - RNA, 20 nt, synthetic construct
  source 1..20: mol_type = other RNA
cctgcagaagatgccagaag

SEQ ID NO: 2681 - RNA, 20 nt, synthetic construct
  source 1..20: mol_type = other RNA
cctgccactgccccggcgca

SEQ ID NO: 2682 - RNA, 20 nt, synthetic construct
  source 1..20: mol_type = other RNA
cctgcctatgcctaaggagg

SEQ ID NO: 2683 - RNA, 20 nt, synthetic construct
  source 1..20: mol_type = other RNA
cctgctcccaccccggccct

SEQ ID NO: 2684 - RNA, 20 nt, synthetic construct
  source 1..20: mol_type = other RNA
cctgctcctccaccagccac

SEQ ID NO: 2685 - RNA, 20 nt, synthetic construct
  source 1..20: mol_type = other RNA
cctggacaagcagttggagt

SEQ ID NO: 2686 - RNA, 20 nt, synthetic construct
  source 1..20: mol_type = other RNA
cctggcctttccggatgtgg

SEQ ID NO: 2687 - RNA, 20 nt, synthetic construct
  source 1..20: mol_type = other RNA
cctgtgccgccttgtcatca

SEQ ID NO: 2688 - RNA, 20 nt, synthetic construct
  source 1..20: mol_type = other RNA
cctgttcacgctgtcagtga

SEQ ID NO: 2689 - RNA, 20 nt, synthetic construct
  source 1..20: mol_type = other RNA
ccttaggcataggcagggcc

SEQ ID NO: 2690 - RNA, 20 nt, synthetic construct
  source 1..20: mol_type = other RNA
ccttccagctctgactgtac

SEQ ID NO: 2691 - RNA, 20 nt, synthetic construct
  source 1..20: mol_type = other RNA
ccttctggcatcttctgcag

SEQ ID NO: 2692 - RNA, 20 nt, synthetic construct
  source 1..20: mol_type = other RNA
ccttggccccctctgcactt

SEQ ID NO: 2693 - RNA, 20 nt, synthetic construct
  source 1..20: mol_type = other RNA
ccttgtcatcaaccgtctgg

SEQ ID NO: 2694 - RNA, 20 nt, synthetic construct
  source 1..20: mol_type = other RNA
ccttgtgcagcactatgtgg

SEQ ID NO: 2695 - RNA, 20 nt, synthetic construct
  source 1..20: mol_type = other RNA
cctttccggatgtggtcagc

SEQ ID NO: 2696 - RNA, 20 nt, synthetic construct
  source 1..20: mol_type = other RNA
cctttgtacgcagaagcagt

SEQ ID NO: 2697 - RNA, 20 nt, synthetic construct
  source 1..20: mol_type = other RNA
cgaagcgacagccccgatcc

SEQ ID NO: 2698 - RNA, 20 nt, synthetic construct
  source 1..20: mol_type = other RNA
cgacaacacctgcagaagat

SEQ ID NO: 2699 - RNA, 20 nt, synthetic construct
  source 1..20: mol_type = other RNA
cgacagccccgatcctgctc

SEQ ID NO: 2700 - RNA, 20 nt, synthetic construct
  source 1..20: mol_type = other RNA
cgacagtaccccttccagct

SEQ ID NO: 2701 - RNA, 20 nt, synthetic construct
  source 1..20: mol_type = other RNA
cgacgtggactgcctgccac

SEQ ID NO: 2702 - RNA, 20 nt, synthetic construct
  source 1..20: mol_type = other RNA
cgactacctccgacagtacc

SEQ ID NO: 2703 - RNA, 20 nt, synthetic construct
  source 1..20: mol_type = other RNA
cgactccagcttccgtctgg

SEQ ID NO: 2704 - RNA, 20 nt, synthetic construct
  source 1..20: mol_type = other RNA
cgaggcccgacaacacctgc

SEQ ID NO: 2705 - RNA, 20 nt, synthetic construct
  source 1..20: mol_type = other RNA
cgagtggttttcactgacag

SEQ ID NO: 2706 - RNA, 20 nt, synthetic construct
  source 1..20: mol_type = other RNA
cgatcctgctcccaccccgg

SEQ ID NO: 2707 - RNA, 20 nt, synthetic construct
  source 1..20: mol_type = other RNA
cgcaccccagctacctgttc

SEQ ID NO: 2708 - RNA, 20 nt, synthetic construct
  source 1..20: mol_type = other RNA
cgcagaagcagtgcccgcag

SEQ ID NO: 2709 - RNA, 20 nt, synthetic construct
  source 1..20: mol_type = other RNA
cgcagcctgcaacacctgtg

SEQ ID NO: 2710 - RNA, 20 nt, synthetic construct
  source 1..20: mol_type = other RNA
cgcatcctccttaggcatag

SEQ ID NO: 2711 - RNA, 20 nt, synthetic construct
  source 1..20: mol_type = other RNA
cgcatcctggcctttccgga

SEQ ID NO: 2712 - RNA, 20 nt, synthetic construct
  source 1..20: mol_type = other RNA
cgcatggccgactacctccg

SEQ ID NO: 2713 - RNA, 20 nt, synthetic construct
  source 1..20: mol_type = other RNA
cgcattgagtatgccgactc

SEQ ID NO: 2714 - RNA, 20 nt, synthetic construct
  source 1..20: mol_type = other RNA
cgccggggcagtggcaggca

SEQ ID NO: 2715 - RNA, 20 nt, synthetic construct
  source 1..20: mol_type = other RNA
cgcctagtgacccagcactg

SEQ ID NO: 2716 - RNA, 20 nt, synthetic construct
  source 1..20: mol_type = other RNA
cgccttgtcatcaaccgtct

SEQ ID NO: 2717 - RNA, 20 nt, synthetic construct
  source 1..20: mol_type = other RNA
cgctggccgtaatggaaccc

SEQ ID NO: 2718 - RNA, 20 nt, synthetic construct
  source 1..20: mol_type = other RNA
cgctgtcagtgaaaaccact

SEQ ID NO: 2719 - RNA, 20 nt, synthetic construct
  source 1..20: mol_type = other RNA
cgcttcgggtatcagcagtg

SEQ ID NO: 2720 - RNA, 20 nt, synthetic construct
  source 1..20: mol_type = other RNA
cggaaaggccaggatgcgtg

SEQ ID NO: 2721 - RNA, 20 nt, synthetic construct
  source 1..20: mol_type = other RNA
cggaagctggagtcggcata

SEQ ID NO: 2722 - RNA, 20 nt, synthetic construct
  source 1..20: mol_type = other RNA
cggaggtagtcggccatgcg

SEQ ID NO: 2723 - RNA, 20 nt, synthetic construct
  source 1..20: mol_type = other RNA
cggatgtggtcagccttgtg

SEQ ID NO: 2724 - RNA, 20 nt, synthetic construct
  source 1..20: mol_type = other RNA
cggcacaggtgttgcaggct

SEQ ID NO: 2725 - RNA, 20 nt, synthetic construct
  source 1..20: mol_type = other RNA
cggcatactcaatgcgtaca

SEQ ID NO: 2726 - RNA, 20 nt, synthetic construct
  source 1..20: mol_type = other RNA
cggccaccagacggttgatg

SEQ ID NO: 2727 - RNA, 20 nt, synthetic construct
  source 1..20: mol_type = other RNA
cggccagcgaggcccgacaa

SEQ ID NO: 2728 - RNA, 20 nt, synthetic construct
  source 1..20: mol_type = other RNA
cggccatgcgccggggcagt

SEQ ID NO: 2729 - RNA, 20 nt, synthetic construct
  source 1..20: mol_type = other RNA
cggccctgcctatgcctaag

SEQ ID NO: 2730 - RNA, 20 nt, synthetic construct
  source 1..20: mol_type = other RNA
cggcgcatggccgactacct

SEQ ID NO: 2731 - RNA, 20 nt, synthetic construct
  source 1..20: mol_type = other RNA
cgggcactgcttctgcgtac

SEQ ID NO: 2732 - RNA, 20 nt, synthetic construct
  source 1..20: mol_type = other RNA
cgggcctcgctggccgtaat

SEQ ID NO: 2733 - RNA, 20 nt, synthetic construct
  source 1..20: mol_type = other RNA
cggggcagtggcaggcagtc

SEQ ID NO: 2734 - RNA, 20 nt, synthetic construct
  source 1..20: mol_type = other RNA
cggggctgtcgcttcgggta

SEQ ID NO: 2735 - RNA, 20 nt, synthetic construct
  source 1..20: mol_type = other RNA
cggggtgggagcaggatcgg

SEQ ID NO: 2736 - RNA, 20 nt, synthetic construct
  source 1..20: mol_type = other RNA
cgggtatcagcagtgcagga

SEQ ID NO: 2737 - RNA, 20 nt, synthetic construct
  source 1..20: mol_type = other RNA
cggttgatgacaaggcggca

SEQ ID NO: 2738 - RNA, 20 nt, synthetic construct
  source 1..20: mol_type = other RNA
cgtaatggaaccccaatacc

SEQ ID NO: 2739 - RNA, 20 nt, synthetic construct
  source 1..20: mol_type = other RNA
cgtacaaagggctgcaccag

SEQ ID NO: 2740 - RNA, 20 nt, synthetic construct
  source 1..20: mol_type = other RNA
cgtacagtcagagctggaag

SEQ ID NO: 2741 - RNA, 20 nt, synthetic construct
  source 1..20: mol_type = other RNA
cgtacattggtggggccacg

SEQ ID NO: 2742 - RNA, 20 nt, synthetic construct
  source 1..20: mol_type = other RNA
cgtactaagaacgtgccttc

SEQ ID NO: 2743 - RNA, 20 nt, synthetic construct
  source 1..20: mol_type = other RNA
cgtcggccaccagacggttg

SEQ ID NO: 2744 - RNA, 20 nt, synthetic construct
  source 1..20: mol_type = other RNA
cgtctggactccaactgctt

SEQ ID NO: 2745 - RNA, 20 nt, synthetic construct
  source 1..20: mol_type = other RNA
cgtctggtggccgacgtgga

SEQ ID NO: 2746 - RNA, 20 nt, synthetic construct
  source 1..20: mol_type = other RNA
cgtgaacaggtagctggggt

SEQ ID NO: 2747 - RNA, 20 nt, synthetic construct
  source 1..20: mol_type = other RNA
cgtgacagcacgcaccccag

SEQ ID NO: 2748 - RNA, 20 nt, synthetic construct
  source 1..20: mol_type = other RNA
cgtgccttctggcatcttct

SEQ ID NO: 2749 - RNA, 20 nt, synthetic construct
  source 1..20: mol_type = other RNA
cgtgctgtcacgtactaaga

SEQ ID NO: 2750 - RNA, 20 nt, synthetic construct
  source 1..20: mol_type = other RNA
cgtggactgcctgccactgc

SEQ ID NO: 2751 - RNA, 20 nt, synthetic construct
  source 1..20: mol_type = other RNA
cgtggccccaccaatgtacg

SEQ ID NO: 2752 - RNA, 20 nt, synthetic construct
  source 1..20: mol_type = other RNA
cgtggcctggacaagcagtt

SEQ ID NO: 2753 - RNA, 20 nt, synthetic construct
  source 1..20: mol_type = other RNA
cgttcttagtacgtgacagc

SEQ ID NO: 2754 - RNA, 20 nt, synthetic construct
  source 1..20: mol_type = other RNA
ctaaaactggtgcagccctt

SEQ ID NO: 2755 - RNA, 20 nt, synthetic construct
  source 1..20: mol_type = other RNA
ctaagaacgtgccttctggc

SEQ ID NO: 2756 - RNA, 20 nt, synthetic construct
  source 1..20: mol_type = other RNA
ctaaggaggatgcgcctagt

SEQ ID NO: 2757 - RNA, 20 nt, synthetic construct
  source 1..20: mol_type = other RNA
ctacctccgacagtacccct

SEQ ID NO: 2758 - RNA, 20 nt, synthetic construct
  source 1..20: mol_type = other RNA
ctacctgttcacgctgtcag

SEQ ID NO: 2759 - RNA, 20 nt, synthetic construct
  source 1..20: mol_type = other RNA
ctaggcaagtgcagaggggg

SEQ ID NO: 2760 - RNA, 20 nt, synthetic construct
  source 1..20: mol_type = other RNA
ctaggcgcatcctccttagg

SEQ ID NO: 2761 - RNA, 20 nt, synthetic construct
  source 1..20: mol_type = other RNA
ctaggctggtattggggttc

SEQ ID NO: 2762 - RNA, 20 nt, synthetic construct
  source 1..20: mol_type = other RNA
ctagtgacccagcactgcct

SEQ ID NO: 2763 - RNA, 20 nt, synthetic construct
  source 1..20: mol_type = other RNA
ctatgcctaaggaggatgcg

SEQ ID NO: 2764 - RNA, 20 nt, synthetic construct
  source 1..20: mol_type = other RNA
ctatgtggcctcctgcactg

SEQ ID NO: 2765 - RNA, 20 nt, synthetic construct
  source 1..20: mol_type = other RNA
ctcaatgcgtacattggtgg

SEQ ID NO: 2766 - RNA, 20 nt, synthetic construct
  source 1..20: mol_type = other RNA
ctccaactgcttgtccaggc

SEQ ID NO: 2767 - RNA, 20 nt, synthetic construct
  source 1..20: mol_type = other RNA
ctccaccagccactgctgta

SEQ ID NO: 2768 - RNA, 20 nt, synthetic construct
  source 1..20: mol_type = other RNA
ctccagcttccgtctggact

SEQ ID NO: 2769 - RNA, 20 nt, synthetic construct
  source 1..20: mol_type = other RNA
ctcccaccccggccctgcct

SEQ ID NO: 2770 - RNA, 20 nt, synthetic construct
  source 1..20: mol_type = other RNA
ctccgacagtaccccttcca

SEQ ID NO: 2771 - RNA, 20 nt, synthetic construct
  source 1..20: mol_type = other RNA
ctcctccaccagccactgct

SEQ ID NO: 2772 - RNA, 20 nt, synthetic construct
  source 1..20: mol_type = other RNA
ctcctgcactgctgataccc

SEQ ID NO: 2773 - RNA, 20 nt, synthetic construct
  source 1..20: mol_type = other RNA
ctccttaggcataggcaggg

SEQ ID NO: 2774 - RNA, 20 nt, synthetic construct
  source 1..20: mol_type = other RNA
ctcgctggccgtaatggaac

SEQ ID NO: 2775 - RNA, 20 nt, synthetic construct
  source 1..20: mol_type = other RNA
ctcgtggccccaccaatgta

SEQ ID NO: 2776 - RNA, 20 nt, synthetic construct
  source 1..20: mol_type = other RNA
ctctgactgtacggggcaat

SEQ ID NO: 2777 - RNA, 20 nt, synthetic construct
  source 1..20: mol_type = other RNA
ctctgcacttgcctaggctg

SEQ ID NO: 2778 - RNA, 20 nt, synthetic construct
  source 1..20: mol_type = other RNA
ctgacagcgtgaacaggtag

SEQ ID NO: 2779 - RNA, 20 nt, synthetic construct
  source 1..20: mol_type = other RNA
ctgaccacatccggaaaggc

SEQ ID NO: 2780 - RNA, 20 nt, synthetic construct
  source 1..20: mol_type = other RNA
ctgactgtacggggcaatct

SEQ ID NO: 2781 - RNA, 20 nt, synthetic construct
  source 1..20: mol_type = other RNA
ctgatacccgaagcgacagc

SEQ ID NO: 2782 - RNA, 20 nt, synthetic construct
  source 1..20: mol_type = other RNA
ctgcaacacctgtgccgcct

SEQ ID NO: 2783 - RNA, 20 nt, synthetic construct
  source 1..20: mol_type = other RNA
ctgcacaaggctgaccacat

SEQ ID NO: 2784 - RNA, 20 nt, synthetic construct
  source 1..20: mol_type = other RNA
ctgcaccagttttaggtgta

SEQ ID NO: 2785 - RNA, 20 nt, synthetic construct
  source 1..20: mol_type = other RNA
ctgcactgctgatacccgaa

SEQ ID NO: 2786 - RNA, 20 nt, synthetic construct
  source 1..20: mol_type = other RNA
ctgcacttgcctaggctggt

SEQ ID NO: 2787 - RNA, 20 nt, synthetic construct
  source 1..20: mol_type = other RNA
ctgcagaagatgccagaagg

SEQ ID NO: 2788 - RNA, 20 nt, synthetic construct
  source 1..20: mol_type = other RNA
ctgcaggtgttgtcgggcct

SEQ ID NO: 2789 - RNA, 20 nt, synthetic construct
  source 1..20: mol_type = other RNA
ctgccactgccccggcgcat

SEQ ID NO: 2790 - RNA, 20 nt, synthetic construct
  source 1..20: mol_type = other RNA
ctgccccggcgcatggccga

SEQ ID NO: 2791 - RNA, 20 nt, synthetic construct
  source 1..20: mol_type = other RNA
ctgcctatgcctaaggagga

SEQ ID NO: 2792 - RNA, 20 nt, synthetic construct
  source 1..20: mol_type = other RNA
ctgcctgccactgccccggc

SEQ ID NO: 2793 - RNA, 20 nt, synthetic construct
  source 1..20: mol_type = other RNA
ctgcctgctcctccaccagc

SEQ ID NO: 2794 - RNA, 20 nt, synthetic construct
  source 1..20: mol_type = other RNA
ctgcgggcactgcttctgcg

SEQ ID NO: 2795 - RNA, 20 nt, synthetic construct
  source 1..20: mol_type = other RNA
ctgcgtacaaagggctgcac

SEQ ID NO: 2796 - RNA, 20 nt, synthetic construct
  source 1..20: mol_type = other RNA
ctgctcccaccccggccctg

SEQ ID NO: 2797 - RNA, 20 nt, synthetic construct
  source 1..20: mol_type = other RNA
ctgctcctccaccagccact

SEQ ID NO: 2798 - RNA, 20 nt, synthetic construct
  source 1..20: mol_type = other RNA
ctgctgatacccgaagcgac

SEQ ID NO: 2799 - RNA, 20 nt, synthetic construct
  source 1..20: mol_type = other RNA
ctgctgtacacctaaaactg

SEQ ID NO: 2800 - RNA, 20 nt, synthetic construct
  source 1..20: mol_type = other RNA
ctgcttctgcgtacaaaggg

SEQ ID NO: 2801 - RNA, 20 nt, synthetic construct
  source 1..20: mol_type = other RNA
ctgcttgtccaggccacgca

SEQ ID NO: 2802 - RNA, 20 nt, synthetic construct
  source 1..20: mol_type = other RNA
ctggaaggggtactgtcgga

SEQ ID NO: 2803 - RNA, 20 nt, synthetic construct
  source 1..20: mol_type = other RNA
ctggacaagcagttggagtc

SEQ ID NO: 2804 - RNA, 20 nt, synthetic construct
  source 1..20: mol_type = other RNA
ctggactccaactgcttgtc

SEQ ID NO: 2805 - RNA, 20 nt, synthetic construct
  source 1..20: mol_type = other RNA
ctggagtcggcatactcaat

SEQ ID NO: 2806 - RNA, 20 nt, synthetic construct
  source 1..20: mol_type = other RNA
ctggcatcttctgcaggtgt

SEQ ID NO: 2807 - RNA, 20 nt, synthetic construct
  source 1..20: mol_type = other RNA
ctggccgtaatggaacccca

SEQ ID NO: 2808 - RNA, 20 nt, synthetic construct
  source 1..20: mol_type = other RNA
ctggcctttccggatgtggt

SEQ ID NO: 2809 - RNA, 20 nt, synthetic construct
  source 1..20: mol_type = other RNA
ctggggtgcgtgctgtcacg

SEQ ID NO: 2810 - RNA, 20 nt, synthetic construct
  source 1..20: mol_type = other RNA
ctgggtcactaggcgcatcc

SEQ ID NO: 2811 - RNA, 20 nt, synthetic construct
  source 1..20: mol_type = other RNA
ctgggtgagggtgggcagat

SEQ ID NO: 2812 - RNA, 20 nt, synthetic construct
  source 1..20: mol_type = other RNA
ctggtattggggttccatta

SEQ ID NO: 2813 - RNA, 20 nt, synthetic construct
  source 1..20: mol_type = other RNA
ctggtgcagccctttgtacg

SEQ ID NO: 2814 - RNA, 20 nt, synthetic construct
  source 1..20: mol_type = other RNA
ctggtggaggagcaggcagt

SEQ ID NO: 2815 - RNA, 20 nt, synthetic construct
  source 1..20: mol_type = other RNA
ctggtggccgacgtggactg

SEQ ID NO: 2816 - RNA, 20 nt, synthetic construct
  source 1..20: mol_type = other RNA
ctgtacacctaaaactggtg

SEQ ID NO: 2817 - RNA, 20 nt, synthetic construct
  source 1..20: mol_type = other RNA
ctgtacggggcaatctgccc

SEQ ID NO: 2818 - RNA, 20 nt, synthetic construct
  source 1..20: mol_type = other RNA
ctgtcacgtactaagaacgt

SEQ ID NO: 2819 - RNA, 20 nt, synthetic construct
  source 1..20: mol_type = other RNA
ctgtcagtgaaaaccactcg

SEQ ID NO: 2820 - RNA, 20 nt, synthetic construct
  source 1..20: mol_type = other RNA
ctgtcgcttcgggtatcagc

SEQ ID NO: 2821 - RNA, 20 nt, synthetic construct
  source 1..20: mol_type = other RNA
ctgtcggaggtagtcggcca

SEQ ID NO: 2822 - RNA, 20 nt, synthetic construct
  source 1..20: mol_type = other RNA
ctgtgccgccttgtcatcaa

SEQ ID NO: 2823 - RNA, 20 nt, synthetic construct
  source 1..20: mol_type = other RNA
ctgttcacgctgtcagtgaa

SEQ ID NO: 2824 - RNA, 20 nt, synthetic construct
  source 1..20: mol_type = other RNA
cttaggcataggcagggccg

SEQ ID NO: 2825 - RNA, 20 nt, synthetic construct
  source 1..20: mol_type = other RNA
cttagtacgtgacagcacgc

SEQ ID NO: 2826 - RNA, 20 nt, synthetic construct
  source 1..20: mol_type = other RNA
cttccagctctgactgtacg

SEQ ID NO: 2827 - RNA, 20 nt, synthetic construct
  source 1..20: mol_type = other RNA
cttccgtctggactccaact

SEQ ID NO: 2828 - RNA, 20 nt, synthetic construct
  source 1..20: mol_type = other RNA
cttcgggtatcagcagtgca

SEQ ID NO: 2829 - RNA, 20 nt, synthetic construct
  source 1..20: mol_type = other RNA
cttctgcaggtgttgtcggg

SEQ ID NO: 2830 - RNA, 20 nt, synthetic construct
  source 1..20: mol_type = other RNA
cttctgcgtacaaagggctg

SEQ ID NO: 2831 - RNA, 20 nt, synthetic construct
  source 1..20: mol_type = other RNA
cttctggcatcttctgcagg

SEQ ID NO: 2832 - RNA, 20 nt, synthetic construct
  source 1..20: mol_type = other RNA
cttgcctaggctggtattgg

SEQ ID NO: 2833 - RNA, 20 nt, synthetic construct
  source 1..20: mol_type = other RNA
cttggccccctctgcacttg

SEQ ID NO: 2834 - RNA, 20 nt, synthetic construct
  source 1..20: mol_type = other RNA
cttgtcatcaaccgtctggt

SEQ ID NO: 2835 - RNA, 20 nt, synthetic construct
  source 1..20: mol_type = other RNA
cttgtccaggccacgcatcc

SEQ ID NO: 2836 - RNA, 20 nt, synthetic construct
  source 1..20: mol_type = other RNA
cttgtgcagcactatgtggc

SEQ ID NO: 2837 - RNA, 20 nt, synthetic construct
  source 1..20: mol_type = other RNA
ctttccggatgtggtcagcc

SEQ ID NO: 2838 - RNA, 20 nt, synthetic construct
  source 1..20: mol_type = other RNA
ctttgtacgcagaagcagtg

SEQ ID NO: 2839 - RNA, 20 nt, synthetic construct
  source 1..20: mol_type = other RNA
gaaaaccactcgtggcccca

SEQ ID NO: 2840 - RNA, 20 nt, synthetic construct
  source 1..20: mol_type = other RNA
gaaaggccaggatgcgtggc

SEQ ID NO: 2841 - RNA, 20 nt, synthetic construct
  source 1..20: mol_type = other RNA
gaacaggtagctggggtgcg

SEQ ID NO: 2842 - RNA, 20 nt, synthetic construct
  source 1..20: mol_type = other RNA
gaaccccaataccagcctag

SEQ ID NO: 2843 - RNA, 20 nt, synthetic construct
  source 1..20: mol_type = other RNA
gaacgtgccttctggcatct

SEQ ID NO: 2844 - RNA, 20 nt, synthetic construct
  source 1..20: mol_type = other RNA
gaagatgccagaaggcacgt

SEQ ID NO: 2845 - RNA, 20 nt, synthetic construct
  source 1..20: mol_type = other RNA
gaagcagtgcccgcagcctg

SEQ ID NO: 2846 - RNA, 20 nt, synthetic construct
  source 1..20: mol_type = other RNA
gaagcgacagccccgatcct

SEQ ID NO: 2847 - RNA, 20 nt, synthetic construct
  source 1..20: mol_type = other RNA
gaagctggagtcggcatact

SEQ ID NO: 2848 - RNA, 20 nt, synthetic construct
  source 1..20: mol_type = other RNA
gaaggcacgttcttagtacg

SEQ ID NO: 2849 - RNA, 20 nt, synthetic construct
  source 1..20: mol_type = other RNA
gaaggggtactgtcggaggt

SEQ ID NO: 2850 - RNA, 20 nt, synthetic construct
  source 1..20: mol_type = other RNA
gacaacacctgcagaagatg

SEQ ID NO: 2851 - RNA, 20 nt, synthetic construct
  source 1..20: mol_type = other RNA
gacaagcagttggagtccag

SEQ ID NO: 2852 - RNA, 20 nt, synthetic construct
  source 1..20: mol_type = other RNA
gacaaggcggcacaggtgtt

SEQ ID NO: 2853 - RNA, 20 nt, synthetic construct
  source 1..20: mol_type = other RNA
gacagcacgcaccccagcta

SEQ ID NO: 2854 - RNA, 20 nt, synthetic construct
  source 1..20: mol_type = other RNA
gacagccccgatcctgctcc

SEQ ID NO: 2855 - RNA, 20 nt, synthetic construct
  source 1..20: mol_type = other RNA
gacagcgtgaacaggtagct

SEQ ID NO: 2856 - RNA, 20 nt, synthetic construct
  source 1..20: mol_type = other RNA
gacagtaccccttccagctc

SEQ ID NO: 2857 - RNA, 20 nt, synthetic construct
  source 1..20: mol_type = other RNA
gaccacatccggaaaggcca

SEQ ID NO: 2858 - RNA, 20 nt, synthetic construct
  source 1..20: mol_type = other RNA
gacccagcactgcctgctcc

SEQ ID NO: 2859 - RNA, 20 nt, synthetic construct
  source 1..20: mol_type = other RNA
gacggaagctggagtcggca

SEQ ID NO: 2860 - RNA, 20 nt, synthetic construct
  source 1..20: mol_type = other RNA
gacggttgatgacaaggcgg

SEQ ID NO: 2861 - RNA, 20 nt, synthetic construct
  source 1..20: mol_type = other RNA
gacgtggactgcctgccact

SEQ ID NO: 2862 - RNA, 20 nt, synthetic construct
  source 1..20: mol_type = other RNA
gactacctccgacagtaccc

SEQ ID NO: 2863 - RNA, 20 nt, synthetic construct
  source 1..20: mol_type = other RNA
gactccaactgcttgtccag

SEQ ID NO: 2864 - RNA, 20 nt, synthetic construct
  source 1..20: mol_type = other RNA
gactccagcttccgtctgga

SEQ ID NO: 2865 - RNA, 20 nt, synthetic construct
  source 1..20: mol_type = other RNA
gactgcctgccactgccccg

SEQ ID NO: 2866 - RNA, 20 nt, synthetic construct
  source 1..20: mol_type = other RNA
gactgtacggggcaatctgc

SEQ ID NO: 2867 - RNA, 20 nt, synthetic construct
  source 1..20: mol_type = other RNA
gagcaggatcggggctgtcg

SEQ ID NO: 2868 - RNA, 20 nt, synthetic construct
  source 1..20: mol_type = other RNA
gagcaggcagtgctgggtca

SEQ ID NO: 2869 - RNA, 20 nt, synthetic construct
  source 1..20: mol_type = other RNA
gagctggaaggggtactgtc

SEQ ID NO: 2870 - RNA, 20 nt, synthetic construct
  source 1..20: mol_type = other RNA
gaggagcaggcagtgctggg

SEQ ID NO: 2871 - RNA, 20 nt, synthetic construct
  source 1..20: mol_type = other RNA
gaggatgcgcctagtgaccc

SEQ ID NO: 2872 - RNA, 20 nt, synthetic construct
  source 1..20: mol_type = other RNA
gaggccacatagtgctgcac

SEQ ID NO: 2873 - RNA, 20 nt, synthetic construct
  source 1..20: mol_type = other RNA
gaggcccgacaacacctgca

SEQ ID NO: 2874 - RNA, 20 nt, synthetic construct
  source 1..20: mol_type = other RNA
gagggtgggcagattgcccc

SEQ ID NO: 2875 - RNA, 20 nt, synthetic construct
  source 1..20: mol_type = other RNA
gaggtagtcggccatgcgcc

SEQ ID NO: 2876 - RNA, 20 nt, synthetic construct
  source 1..20: mol_type = other RNA
gagtatgccgactccagctt

SEQ ID NO: 2877 - RNA, 20 nt, synthetic construct
  source 1..20: mol_type = other RNA
gagtccagacggaagctgga

SEQ ID NO: 2878 - RNA, 20 nt, synthetic construct
  source 1..20: mol_type = other RNA
gagtcggcatactcaatgcg

SEQ ID NO: 2879 - RNA, 20 nt, synthetic construct
  source 1..20: mol_type = other RNA
gagtggttttcactgacagc

SEQ ID NO: 2880 - RNA, 20 nt, synthetic construct
  source 1..20: mol_type = other RNA
gatacccgaagcgacagccc

SEQ ID NO: 2881 - RNA, 20 nt, synthetic construct
  source 1..20: mol_type = other RNA
gatcctgctcccaccccggc

SEQ ID NO: 2882 - RNA, 20 nt, synthetic construct
  source 1..20: mol_type = other RNA
gatcggggctgtcgcttcgg

SEQ ID NO: 2883 - RNA, 20 nt, synthetic construct
  source 1..20: mol_type = other RNA
gatgacaaggcggcacaggt

SEQ ID NO: 2884 - RNA, 20 nt, synthetic construct
  source 1..20: mol_type = other RNA
gatgccagaaggcacgttct

SEQ ID NO: 2885 - RNA, 20 nt, synthetic construct
  source 1..20: mol_type = other RNA
gatgcgcctagtgacccagc

SEQ ID NO: 2886 - RNA, 20 nt, synthetic construct
  source 1..20: mol_type = other RNA
gatgcgtggcctggacaagc

SEQ ID NO: 2887 - RNA, 20 nt, synthetic construct
  source 1..20: mol_type = other RNA
gatgtggtcagccttgtgca

SEQ ID NO: 2888 - RNA, 20 nt, synthetic construct
  source 1..20: mol_type = other RNA
gattgccccgtacagtcaga

SEQ ID NO: 2889 - RNA, 20 nt, synthetic construct
  source 1..20: mol_type = other RNA
gcaacacctgtgccgccttg

SEQ ID NO: 2890 - RNA, 20 nt, synthetic construct
  source 1..20: mol_type = other RNA
gcacaaggctgaccacatcc

SEQ ID NO: 2891 - RNA, 20 nt, synthetic construct
  source 1..20: mol_type = other RNA
gcacaggtgttgcaggctgc

SEQ ID NO: 2892 - RNA, 20 nt, synthetic construct
  source 1..20: mol_type = other RNA
gcaccagttttaggtgtaca

SEQ ID NO: 2893 - RNA, 20 nt, synthetic construct
  source 1..20: mol_type = other RNA
gcaccccagctacctgttca

SEQ ID NO: 2894 - RNA, 20 nt, synthetic construct
  source 1..20: mol_type = other RNA
gcacgcaccccagctacctg

SEQ ID NO: 2895 - RNA, 20 nt, synthetic construct
  source 1..20: mol_type = other RNA
gcacgttcttagtacgtgac

SEQ ID NO: 2896 - RNA, 20 nt, synthetic construct
  source 1..20: mol_type = other RNA
gcactatgtggcctcctgca

SEQ ID NO: 2897 - RNA, 20 nt, synthetic construct
  source 1..20: mol_type = other RNA
gcactgcctgctcctccacc

SEQ ID NO: 2898 - RNA, 20 nt, synthetic construct
  source 1..20: mol_type = other RNA
gcactgctgatacccgaagc

SEQ ID NO: 2899 - RNA, 20 nt, synthetic construct
  source 1..20: mol_type = other RNA
gcactgcttctgcgtacaaa

SEQ ID NO: 2900 - RNA, 20 nt, synthetic construct
  source 1..20: mol_type = other RNA
gcacttgcctaggctggtat

SEQ ID NO: 2901 - RNA, 20 nt, synthetic construct
  source 1..20: mol_type = other RNA
gcagaagatgccagaaggca

SEQ ID NO: 2902 - RNA, 20 nt, synthetic construct
  source 1..20: mol_type = other RNA
gcagaagcagtgcccgcagc

SEQ ID NO: 2903 - RNA, 20 nt, synthetic construct
  source 1..20: mol_type = other RNA
gcagattgccccgtacagtc

SEQ ID NO: 2904 - RNA, 20 nt, synthetic construct
  source 1..20: mol_type = other RNA
gcagcactatgtggcctcct

SEQ ID NO: 2905 - RNA, 20 nt, synthetic construct
  source 1..20: mol_type = other RNA
gcagccctttgtacgcagaa

SEQ ID NO: 2906 - RNA, 20 nt, synthetic construct
  source 1..20: mol_type = other RNA
gcagcctgcaacacctgtgc

SEQ ID NO: 2907 - RNA, 20 nt, synthetic construct
  source 1..20: mol_type = other RNA
gcaggaggccacatagtgct

SEQ ID NO: 2908 - RNA, 20 nt, synthetic construct
  source 1..20: mol_type = other RNA
gcaggatcggggctgtcgct

SEQ ID NO: 2909 - RNA, 20 nt, synthetic construct
  source 1..20: mol_type = other RNA
gcaggcagtccacgtcggcc

SEQ ID NO: 2910 - RNA, 20 nt, synthetic construct
  source 1..20: mol_type = other RNA
gcaggcagtgctgggtcact

SEQ ID NO: 2911 - RNA, 20 nt, synthetic construct
  source 1..20: mol_type = other RNA
gcaggctgcgggcactgctt

SEQ ID NO: 2912 - RNA, 20 nt, synthetic construct
  source 1..20: mol_type = other RNA
gcagggccggggtgggagca

SEQ ID NO: 2913 - RNA, 20 nt, synthetic construct
  source 1..20: mol_type = other RNA
gcaggtgttgtcgggcctcg

SEQ ID NO: 2914 - RNA, 20 nt, synthetic construct
  source 1..20: mol_type = other RNA
gcagtccacgtcggccacca

SEQ ID NO: 2915 - RNA, 20 nt, synthetic construct
  source 1..20: mol_type = other RNA
gcagtgcaggaggccacata

SEQ ID NO: 2916 - RNA, 20 nt, synthetic construct
  source 1..20: mol_type = other RNA
gcagtgcccgcagcctgcaa

SEQ ID NO: 2917 - RNA, 20 nt, synthetic construct
  source 1..20: mol_type = other RNA
gcagtgctgggtcactaggc

SEQ ID NO: 2918 - RNA, 20 nt, synthetic construct
  source 1..20: mol_type = other RNA
gcagtggcaggcagtccacg

SEQ ID NO: 2919 - RNA, 20 nt, synthetic construct
  source 1..20: mol_type = other RNA
gcagtggctggtggaggagc

SEQ ID NO: 2920 - RNA, 20 nt, synthetic construct
  source 1..20: mol_type = other RNA
gcagttggagtccagacgga

SEQ ID NO: 2921 - RNA, 20 nt, synthetic construct
  source 1..20: mol_type = other RNA
gcatactcaatgcgtacatt

SEQ ID NO: 2922 - RNA, 20 nt, synthetic construct
  source 1..20: mol_type = other RNA
gcataggcagggccggggtg

SEQ ID NO: 2923 - RNA, 20 nt, synthetic construct
  source 1..20: mol_type = other RNA
gcatcctccttaggcatagg

SEQ ID NO: 2924 - RNA, 20 nt, synthetic construct
  source 1..20: mol_type = other RNA
gcatcctggcctttccggat

SEQ ID NO: 2925 - RNA, 20 nt, synthetic construct
  source 1..20: mol_type = other RNA
gcatcttctgcaggtgttgt

SEQ ID NO: 2926 - RNA, 20 nt, synthetic construct
  source 1..20: mol_type = other RNA
gcatggccgactacctccga

SEQ ID NO: 2927 - RNA, 20 nt, synthetic construct
  source 1..20: mol_type = other RNA
gcattgagtatgccgactcc

SEQ ID NO: 2928 - RNA, 20 nt, synthetic construct
  source 1..20: mol_type = other RNA
gccacatagtgctgcacaag

SEQ ID NO: 2929 - RNA, 20 nt, synthetic construct
  source 1..20: mol_type = other RNA
gccaccagacggttgatgac

SEQ ID NO: 2930 - RNA, 20 nt, synthetic construct
  source 1..20: mol_type = other RNA
gccacgagtggttttcactg

SEQ ID NO: 2931 - RNA, 20 nt, synthetic construct
  source 1..20: mol_type = other RNA
gccacgcatcctggcctttc

SEQ ID NO: 2932 - RNA, 20 nt, synthetic construct
  source 1..20: mol_type = other RNA
gccactgccccggcgcatgg

SEQ ID NO: 2933 - RNA, 20 nt, synthetic construct
  source 1..20: mol_type = other RNA
gccactgctgtacacctaaa

SEQ ID NO: 2934 - RNA, 20 nt, synthetic construct
  source 1..20: mol_type = other RNA
gccagaaggcacgttcttag

SEQ ID NO: 2935 - RNA, 20 nt, synthetic construct
  source 1..20: mol_type = other RNA
gccagcgaggcccgacaaca

SEQ ID NO: 2936 - RNA, 20 nt, synthetic construct
  source 1..20: mol_type = other RNA
gccaggatgcgtggcctgga

SEQ ID NO: 2937 - RNA, 20 nt, synthetic construct
  source 1..20: mol_type = other RNA
gccatgcgccggggcagtgg

SEQ ID NO: 2938 - RNA, 20 nt, synthetic construct
  source 1..20: mol_type = other RNA
gccccaccaatgtacgcatt

SEQ ID NO: 2939 - RNA, 20 nt, synthetic construct
  source 1..20: mol_type = other RNA
gccccctctgcacttgccta

SEQ ID NO: 2940 - RNA, 20 nt, synthetic construct
  source 1..20: mol_type = other RNA
gccccgatcctgctcccacc

SEQ ID NO: 2941 - RNA, 20 nt, synthetic construct
  source 1..20: mol_type = other RNA
gccccggcgcatggccgact

SEQ ID NO: 2942 - RNA, 20 nt, synthetic construct
  source 1..20: mol_type = other RNA
gccccgtacagtcagagctg

SEQ ID NO: 2943 - RNA, 20 nt, synthetic construct
  source 1..20: mol_type = other RNA
gcccgacaacacctgcagaa

SEQ ID NO: 2944 - RNA, 20 nt, synthetic construct
  source 1..20: mol_type = other RNA
gcccgcagcctgcaacacct

SEQ ID NO: 2945 - RNA, 20 nt, synthetic construct
  source 1..20: mol_type = other RNA
gccctgcctatgcctaagga

SEQ ID NO: 2946 - RNA, 20 nt, synthetic construct
  source 1..20: mol_type = other RNA
gccctttgtacgcagaagca

SEQ ID NO: 2947 - RNA, 20 nt, synthetic construct
  source 1..20: mol_type = other RNA
gccgacgtggactgcctgcc

SEQ ID NO: 2948 - RNA, 20 nt, synthetic construct
  source 1..20: mol_type = other RNA
gccgactacctccgacagta

SEQ ID NO: 2949 - RNA, 20 nt, synthetic construct
  source 1..20: mol_type = other RNA
gccgactccagcttccgtct

SEQ ID NO: 2950 - RNA, 20 nt, synthetic construct
  source 1..20: mol_type = other RNA
gccgccttgtcatcaaccgt

SEQ ID NO: 2951 - RNA, 20 nt, synthetic construct
  source 1..20: mol_type = other RNA
gccggggcagtggcaggcag

SEQ ID NO: 2952 - RNA, 20 nt, synthetic construct
  source 1..20: mol_type = other RNA
gccggggtgggagcaggatc

SEQ ID NO: 2953 - RNA, 20 nt, synthetic construct
  source 1..20: mol_type = other RNA
gccgtaatggaaccccaata

SEQ ID NO: 2954 - RNA, 20 nt, synthetic construct
  source 1..20: mol_type = other RNA
gcctaaggaggatgcgccta

SEQ ID NO: 2955 - RNA, 20 nt, synthetic construct
  source 1..20: mol_type = other RNA
gcctaggcaagtgcagaggg

SEQ ID NO: 2956 - RNA, 20 nt, synthetic construct
  source 1..20: mol_type = other RNA
gcctaggctggtattggggt

SEQ ID NO: 2957 - RNA, 20 nt, synthetic construct
  source 1..20: mol_type = other RNA
gcctagtgacccagcactgc

SEQ ID NO: 2958 - RNA, 20 nt, synthetic construct
  source 1..20: mol_type = other RNA
gcctatgcctaaggaggatg

SEQ ID NO: 2959 - RNA, 20 nt, synthetic construct
  source 1..20: mol_type = other RNA
gcctcctgcactgctgatac

SEQ ID NO: 2960 - RNA, 20 nt, synthetic construct
  source 1..20: mol_type = other RNA
gcctcgctggccgtaatgga

SEQ ID NO: 2961 - RNA, 20 nt, synthetic construct
  source 1..20: mol_type = other RNA
gcctgcaacacctgtgccgc

SEQ ID NO: 2962 - RNA, 20 nt, synthetic construct
  source 1..20: mol_type = other RNA
gcctgctcctccaccagcca

SEQ ID NO: 2963 - RNA, 20 nt, synthetic construct
  source 1..20: mol_type = other RNA
gcctggacaagcagttggag

SEQ ID NO: 2964 - RNA, 20 nt, synthetic construct
  source 1..20: mol_type = other RNA
gccttctggcatcttctgca

SEQ ID NO: 2965 - RNA, 20 nt, synthetic construct
  source 1..20: mol_type = other RNA
gccttgtcatcaaccgtctg

SEQ ID NO: 2966 - RNA, 20 nt, synthetic construct
  source 1..20: mol_type = other RNA
gccttgtgcagcactatgtg

SEQ ID NO: 2967 - RNA, 20 nt, synthetic construct
  source 1..20: mol_type = other RNA
gcctttccggatgtggtcag

SEQ ID NO: 2968 - RNA, 20 nt, synthetic construct
  source 1..20: mol_type = other RNA
gcgacagccccgatcctgct

SEQ ID NO: 2969 - RNA, 20 nt, synthetic construct
  source 1..20: mol_type = other RNA
gcgaggcccgacaacacctg

SEQ ID NO: 2970 - RNA, 20 nt, synthetic construct
  source 1..20: mol_type = other RNA
gcgcatcctccttaggcata

SEQ ID NO: 2971 - RNA, 20 nt, synthetic construct
  source 1..20: mol_type = other RNA
gcgcatggccgactacctcc

SEQ ID NO: 2972 - RNA, 20 nt, synthetic construct
  source 1..20: mol_type = other RNA
gcgcctagtgacccagcact

SEQ ID NO: 2973 - RNA, 20 nt, synthetic construct
  source 1..20: mol_type = other RNA
gcggcacaggtgttgcaggc

SEQ ID NO: 2974 - RNA, 20 nt, synthetic construct
  source 1..20: mol_type = other RNA
gcgggcactgcttctgcgta

SEQ ID NO: 2975 - RNA, 20 nt, synthetic construct
  source 1..20: mol_type = other RNA
gcgtacaaagggctgcacca

SEQ ID NO: 2976 - RNA, 20 nt, synthetic construct
  source 1..20: mol_type = other RNA
gcgtacattggtggggccac

SEQ ID NO: 2977 - RNA, 20 nt, synthetic construct
  source 1..20: mol_type = other RNA
gcgtgaacaggtagctgggg

SEQ ID NO: 2978 - RNA, 20 nt, synthetic construct
  source 1..20: mol_type = other RNA
gcgtgctgtcacgtactaag

SEQ ID NO: 2979 - RNA, 20 nt, synthetic construct
  source 1..20: mol_type = other RNA
gcgtggcctggacaagcagt

SEQ ID NO: 2980 - RNA, 20 nt, synthetic construct
  source 1..20: mol_type = other RNA
gctacctgttcacgctgtca

SEQ ID NO: 2981 - RNA, 20 nt, synthetic construct
  source 1..20: mol_type = other RNA
gctcctccaccagccactgc

SEQ ID NO: 2982 - RNA, 20 nt, synthetic construct
  source 1..20: mol_type = other RNA
gctctgactgtacggggcaa

SEQ ID NO: 2983 - RNA, 20 nt, synthetic construct
  source 1..20: mol_type = other RNA
gctgaccacatccggaaagg

SEQ ID NO: 2984 - RNA, 20 nt, synthetic construct
  source 1..20: mol_type = other RNA
gctgatacccgaagcgacag

SEQ ID NO: 2985 - RNA, 20 nt, synthetic construct
  source 1..20: mol_type = other RNA
gctgcacaaggctgaccaca

SEQ ID NO: 2986 - RNA, 20 nt, synthetic construct
  source 1..20: mol_type = other RNA
gctgcaccagttttaggtgt

SEQ ID NO: 2987 - RNA, 20 nt, synthetic construct
  source 1..20: mol_type = other RNA
gctgcgggcactgcttctgc

SEQ ID NO: 2988 - RNA, 20 nt, synthetic construct
  source 1..20: mol_type = other RNA
gctggaaggggtactgtcgg

SEQ ID NO: 2989 - RNA, 20 nt, synthetic construct
  source 1..20: mol_type = other RNA
gctggagtcggcatactcaa

SEQ ID NO: 2990 - RNA, 20 nt, synthetic construct
  source 1..20: mol_type = other RNA
gctggccgtaatggaacccc

SEQ ID NO: 2991 - RNA, 20 nt, synthetic construct
  source 1..20: mol_type = other RNA
gctggggtgcgtgctgtcac

SEQ ID NO: 2992 - RNA, 20 nt, synthetic construct
  source 1..20: mol_type = other RNA
gctgggtcactaggcgcatc

SEQ ID NO: 2993 - RNA, 20 nt, synthetic construct
  source 1..20: mol_type = other RNA
gctggtattggggttccatt

SEQ ID NO: 2994 - RNA, 20 nt, synthetic construct
  source 1..20: mol_type = other RNA
gctggtggaggagcaggcag

SEQ ID NO: 2995 - RNA, 20 nt, synthetic construct
  source 1..20: mol_type = other RNA
gctgtacacctaaaactggt

SEQ ID NO: 2996 - RNA, 20 nt, synthetic construct
  source 1..20: mol_type = other RNA
gctgtcacgtactaagaacg

SEQ ID NO: 2997 - RNA, 20 nt, synthetic construct
  source 1..20: mol_type = other RNA
gctgtcagtgaaaaccactc

SEQ ID NO: 2998 - RNA, 20 nt, synthetic construct
  source 1..20: mol_type = other RNA
gctgtcgcttcgggtatcag

SEQ ID NO: 2999 - RNA, 20 nt, synthetic construct
  source 1..20: mol_type = other RNA
gcttccgtctggactccaac

SEQ ID NO: 3000 - RNA, 20 nt, synthetic construct
  source 1..20: mol_type = other RNA
gcttcgggtatcagcagtgc

SEQ ID NO: 3001 - RNA, 20 nt, synthetic construct
  source 1..20: mol_type = other RNA
gcttctgcgtacaaagggct

SEQ ID NO: 3002 - RNA, 20 nt, synthetic construct
  source 1..20: mol_type = other RNA
gcttgtccaggccacgcatc

SEQ ID NO: 3003 - RNA, 20 nt, synthetic construct
  source 1..20: mol_type = other RNA
ggaaaggccaggatgcgtgg

SEQ ID NO: 3004 - RNA, 20 nt, synthetic construct
  source 1..20: mol_type = other RNA
ggaaccccaataccagccta

SEQ ID NO: 3005 - RNA, 20 nt, synthetic construct
  source 1..20: mol_type = other RNA
ggaagctggagtcggcatac

SEQ ID NO: 3006 - RNA, 20 nt, synthetic construct
  source 1..20: mol_type = other RNA
ggaaggggtactgtcggagg

SEQ ID NO: 3007 - RNA, 20 nt, synthetic construct
  source 1..20: mol_type = other RNA
ggacaagcagttggagtcca

SEQ ID NO: 3008 - RNA, 20 nt, synthetic construct
  source 1..20: mol_type = other RNA
ggactccaactgcttgtcca

SEQ ID NO: 3009 - RNA, 20 nt, synthetic construct
  source 1..20: mol_type = other RNA
ggactgcctgccactgcccc

SEQ ID NO: 3010 - RNA, 20 nt, synthetic construct
  source 1..20: mol_type = other RNA
ggagcaggatcggggctgtc

SEQ ID NO: 3011 - RNA, 20 nt, synthetic construct
  source 1..20: mol_type = other RNA
ggagcaggcagtgctgggtc

SEQ ID NO: 3012 - RNA, 20 nt, synthetic construct
  source 1..20: mol_type = other RNA
ggaggagcaggcagtgctgg

SEQ ID NO: 3013 - RNA, 20 nt, synthetic construct
  source 1..20: mol_type = other RNA
ggaggatgcgcctagtgacc

SEQ ID NO: 3014 - RNA, 20 nt, synthetic construct
  source 1..20: mol_type = other RNA
ggaggccacatagtgctgca

SEQ ID NO: 3015 - RNA, 20 nt, synthetic construct
  source 1..20: mol_type = other RNA
ggaggtagtcggccatgcgc

SEQ ID NO: 3016 - RNA, 20 nt, synthetic construct
  source 1..20: mol_type = other RNA
ggagtccagacggaagctgg

SEQ ID NO: 3017 - RNA, 20 nt, synthetic construct
  source 1..20: mol_type = other RNA
ggagtcggcatactcaatgc

SEQ ID NO: 3018 - RNA, 20 nt, synthetic construct
  source 1..20: mol_type = other RNA
ggatcggggctgtcgcttcg

SEQ ID NO: 3019 - RNA, 20 nt, synthetic construct
  source 1..20: mol_type = other RNA
ggatgcgcctagtgacccag

SEQ ID NO: 3020 - RNA, 20 nt, synthetic construct
  source 1..20: mol_type = other RNA
ggatgcgtggcctggacaag

SEQ ID NO: 3021 - RNA, 20 nt, synthetic construct
  source 1..20: mol_type = other RNA
ggatgtggtcagccttgtgc

SEQ ID NO: 3022 - RNA, 20 nt, synthetic construct
  source 1..20: mol_type = other RNA
ggcaagtgcagagggggcca

SEQ ID NO: 3023 - RNA, 20 nt, synthetic construct
  source 1..20: mol_type = other RNA
ggcacaggtgttgcaggctg

SEQ ID NO: 3024 - RNA, 20 nt, synthetic construct
  source 1..20: mol_type = other RNA
ggcacgttcttagtacgtga

SEQ ID NO: 3025 - RNA, 20 nt, synthetic construct
  source 1..20: mol_type = other RNA
ggcactgcttctgcgtacaa

SEQ ID NO: 3026 - RNA, 20 nt, synthetic construct
  source 1..20: mol_type = other RNA
ggcagattgccccgtacagt

SEQ ID NO: 3027 - RNA, 20 nt, synthetic construct
  source 1..20: mol_type = other RNA
ggcaggcagtccacgtcggc

SEQ ID NO: 3028 - RNA, 20 nt, synthetic construct
  source 1..20: mol_type = other RNA
ggcagtccacgtcggccacc

SEQ ID NO: 3029 - RNA, 20 nt, synthetic construct
  source 1..20: mol_type = other RNA
ggcagtgctgggtcactagg

SEQ ID NO: 3030 - RNA, 20 nt, synthetic construct
  source 1..20: mol_type = other RNA
ggcagtggcaggcagtccac

SEQ ID NO: 3031 - RNA, 20 nt, synthetic construct
  source 1..20: mol_type = other RNA
ggcatactcaatgcgtacat

SEQ ID NO: 3032 - RNA, 20 nt, synthetic construct
  source 1..20: mol_type = other RNA
ggcataggcagggccggggt

SEQ ID NO: 3033 - RNA, 20 nt, synthetic construct
  source 1..20: mol_type = other RNA
ggcatcttctgcaggtgttg

SEQ ID NO: 3034 - RNA, 20 nt, synthetic construct
  source 1..20: mol_type = other RNA
ggccacatagtgctgcacaa

SEQ ID NO: 3035 - RNA, 20 nt, synthetic construct
  source 1..20: mol_type = other RNA
ggccaccagacggttgatga

SEQ ID NO: 3036 - RNA, 20 nt, synthetic construct
  source 1..20: mol_type = other RNA
ggccacgagtggttttcact

SEQ ID NO: 3037 - RNA, 20 nt, synthetic construct
  source 1..20: mol_type = other RNA
ggccacgcatcctggccttt

SEQ ID NO: 3038 - RNA, 20 nt, synthetic construct
  source 1..20: mol_type = other RNA
ggccagcgaggcccgacaac

SEQ ID NO: 3039 - RNA, 20 nt, synthetic construct
  source 1..20: mol_type = other RNA
ggccaggatgcgtggcctgg

SEQ ID NO: 3040 - RNA, 20 nt, synthetic construct
  source 1..20: mol_type = other RNA
ggccatgcgccggggcagtg

SEQ ID NO: 3041 - RNA, 20 nt, synthetic construct
  source 1..20: mol_type = other RNA
ggccccaccaatgtacgcat

SEQ ID NO: 3042 - RNA, 20 nt, synthetic construct
  source 1..20: mol_type = other RNA
ggccccctctgcacttgcct

SEQ ID NO: 3043 - RNA, 20 nt, synthetic construct
  source 1..20: mol_type = other RNA
ggcccgacaacacctgcaga

SEQ ID NO: 3044 - RNA, 20 nt, synthetic construct
  source 1..20: mol_type = other RNA
ggccctgcctatgcctaagg

SEQ ID NO: 3045 - RNA, 20 nt, synthetic construct
  source 1..20: mol_type = other RNA
ggccgacgtggactgcctgc

SEQ ID NO: 3046 - RNA, 20 nt, synthetic construct
  source 1..20: mol_type = other RNA
ggccgactacctccgacagt

SEQ ID NO: 3047 - RNA, 20 nt, synthetic construct
  source 1..20: mol_type = other RNA
ggccggggtgggagcaggat

SEQ ID NO: 3048 - RNA, 20 nt, synthetic construct
  source 1..20: mol_type = other RNA
ggccgtaatggaaccccaat

SEQ ID NO: 3049 - RNA, 20 nt, synthetic construct
  source 1..20: mol_type = other RNA
ggcctcctgcactgctgata

SEQ ID NO: 3050 - RNA, 20 nt, synthetic construct
  source 1..20: mol_type = other RNA
ggcctcgctggccgtaatgg

SEQ ID NO: 3051 - RNA, 20 nt, synthetic construct
  source 1..20: mol_type = other RNA
ggcctggacaagcagttgga

SEQ ID NO: 3052 - RNA, 20 nt, synthetic construct
  source 1..20: mol_type = other RNA
ggcctttccggatgtggtca

SEQ ID NO: 3053 - RNA, 20 nt, synthetic construct
  source 1..20: mol_type = other RNA
ggcgcatcctccttaggcat

SEQ ID NO: 3054 - RNA, 20 nt, synthetic construct
  source 1..20: mol_type = other RNA
ggcgcatggccgactacctc

SEQ ID NO: 3055 - RNA, 20 nt, synthetic construct
  source 1..20: mol_type = other RNA
ggcggcacaggtgttgcagg

SEQ ID NO: 3056 - RNA, 20 nt, synthetic construct
  source 1..20: mol_type = other RNA
ggctgaccacatccggaaag

SEQ ID NO: 3057 - RNA, 20 nt, synthetic construct
  source 1..20: mol_type = other RNA
ggctgcaccagttttaggtg

SEQ ID NO: 3058 - RNA, 20 nt, synthetic construct
  source 1..20: mol_type = other RNA
ggctgcgggcactgcttctg

SEQ ID NO: 3059 - RNA, 20 nt, synthetic construct
  source 1..20: mol_type = other RNA
ggctggtattggggttccat

SEQ ID NO: 3060 - RNA, 20 nt, synthetic construct
  source 1..20: mol_type = other RNA
ggctggtggaggagcaggca

SEQ ID NO: 3061 - RNA, 20 nt, synthetic construct
  source 1..20: mol_type = other RNA
ggctgtcgcttcgggtatca

SEQ ID NO: 3062 - RNA, 20 nt, synthetic construct
  source 1..20: mol_type = other RNA
gggagcaggatcggggctgt

SEQ ID NO: 3063 - RNA, 20 nt, synthetic construct
  source 1..20: mol_type = other RNA
gggcactgcttctgcgtaca

SEQ ID NO: 3064 - RNA, 20 nt, synthetic construct
  source 1..20: mol_type = other RNA
gggcagattgccccgtacag

SEQ ID NO: 3065 - RNA, 20 nt, synthetic construct
  source 1..20: mol_type = other RNA
gggcagtggcaggcagtcca

SEQ ID NO: 3066 - RNA, 20 nt, synthetic construct
  source 1..20: mol_type = other RNA
gggccacgagtggttttcac

SEQ ID NO: 3067 - RNA, 20 nt, synthetic construct
  source 1..20: mol_type = other RNA
gggccggggtgggagcagga

SEQ ID NO: 3068 - RNA, 20 nt, synthetic construct
  source 1..20: mol_type = other RNA
gggcctcgctggccgtaatg

SEQ ID NO: 3069 - RNA, 20 nt, synthetic construct
  source 1..20: mol_type = other RNA
gggctgcaccagttttaggt

SEQ ID NO: 3070 - RNA, 20 nt, synthetic construct
  source 1..20: mol_type = other RNA
gggctgtcgcttcgggtatc

SEQ ID NO: 3071 - RNA, 20 nt, synthetic construct
  source 1..20: mol_type = other RNA
ggggcagtggcaggcagtcc

SEQ ID NO: 3072 - RNA, 20 nt, synthetic construct
  source 1..20: mol_type = other RNA
ggggccacgagtggttttca

SEQ ID NO: 3073 - RNA, 20 nt, synthetic construct
  source 1..20: mol_type = other RNA
ggggctgtcgcttcgggtat

SEQ ID NO: 3074 - RNA, 20 nt, synthetic construct
  source 1..20: mol_type = other RNA
ggggtactgtcggaggtagt

SEQ ID NO: 3075 - RNA, 20 nt, synthetic construct
  source 1..20: mol_type = other RNA
ggggtgcgtgctgtcacgta

SEQ ID NO: 3076 - RNA, 20 nt, synthetic construct
  source 1..20: mol_type = other RNA
ggggtgggagcaggatcggg

SEQ ID NO: 3077 - RNA, 20 nt, synthetic construct
  source 1..20: mol_type = other RNA
ggggttccattacggccagc

SEQ ID NO: 3078 - RNA, 20 nt, synthetic construct
  source 1..20: mol_type = other RNA
gggtactgtcggaggtagtc

SEQ ID NO: 3079 - RNA, 20 nt, synthetic construct
  source 1..20: mol_type = other RNA
gggtatcagcagtgcaggag

SEQ ID NO: 3080 - RNA, 20 nt, synthetic construct
  source 1..20: mol_type = other RNA
gggtcactaggcgcatcctc

SEQ ID NO: 3081 - RNA, 20 nt, synthetic construct
  source 1..20: mol_type = other RNA
gggtgagggtgggcagattg

SEQ ID NO: 3082 - RNA, 20 nt, synthetic construct
  source 1..20: mol_type = other RNA
gggtgcgtgctgtcacgtac

SEQ ID NO: 3083 - RNA, 20 nt, synthetic construct
  source 1..20: mol_type = other RNA
gggtgggagcaggatcgggg

SEQ ID NO: 3084 - RNA, 20 nt, synthetic construct
  source 1..20: mol_type = other RNA
gggtgggcagattgccccgt

SEQ ID NO: 3085 - RNA, 20 nt, synthetic construct
  source 1..20: mol_type = other RNA
gggttccattacggccagcg

SEQ ID NO: 3086 - RNA, 20 nt, synthetic construct
  source 1..20: mol_type = other RNA
ggtactgtcggaggtagtcg

SEQ ID NO: 3087 - RNA, 20 nt, synthetic construct
  source 1..20: mol_type = other RNA
ggtagctggggtgcgtgctg

SEQ ID NO: 3088 - RNA, 20 nt, synthetic construct
  source 1..20: mol_type = other RNA
ggtagtcggccatgcgccgg

SEQ ID NO: 3089 - RNA, 20 nt, synthetic construct
  source 1..20: mol_type = other RNA
ggtatcagcagtgcaggagg

SEQ ID NO: 3090 - RNA, 20 nt, synthetic construct
  source 1..20: mol_type = other RNA
ggtattggggttccattacg

SEQ ID NO: 3091 - RNA, 20 nt, synthetic construct
  source 1..20: mol_type = other RNA
ggtcactaggcgcatcctcc

SEQ ID NO: 3092 - RNA, 20 nt, synthetic construct
  source 1..20: mol_type = other RNA
ggtcagccttgtgcagcact

SEQ ID NO: 3093 - RNA, 20 nt, synthetic construct
  source 1..20: mol_type = other RNA
ggtgagggtgggcagattgc

SEQ ID NO: 3094 - RNA, 20 nt, synthetic construct
  source 1..20: mol_type = other RNA
ggtgcagccctttgtacgca

SEQ ID NO: 3095 - RNA, 20 nt, synthetic construct
  source 1..20: mol_type = other RNA
ggtgcgtgctgtcacgtact

SEQ ID NO: 3096 - RNA, 20 nt, synthetic construct
  source 1..20: mol_type = other RNA
ggtggaggagcaggcagtgc

SEQ ID NO: 3097 - RNA, 20 nt, synthetic construct
  source 1..20: mol_type = other RNA
ggtggccgacgtggactgcc

SEQ ID NO: 3098 - RNA, 20 nt, synthetic construct
  source 1..20: mol_type = other RNA
ggtgggagcaggatcggggc

SEQ ID NO: 3099 - RNA, 20 nt, synthetic construct
  source 1..20: mol_type = other RNA
ggtgggcagattgccccgta

SEQ ID NO: 3100 - RNA, 20 nt, synthetic construct
  source 1..20: mol_type = other RNA
ggtggggccacgagtggttt

SEQ ID NO: 3101 - RNA, 20 nt, synthetic construct
  source 1..20: mol_type = other RNA
ggtgtacagcagtggctggt

SEQ ID NO: 3102 - RNA, 20 nt, synthetic construct
  source 1..20: mol_type = other RNA
ggtgttgcaggctgcgggca

SEQ ID NO: 3103 - RNA, 20 nt, synthetic construct
  source 1..20: mol_type = other RNA
ggtgttgtcgggcctcgctg

SEQ ID NO: 3104 - RNA, 20 nt, synthetic construct
  source 1..20: mol_type = other RNA
ggttccattacggccagcga

SEQ ID NO: 3105 - RNA, 20 nt, synthetic construct
  source 1..20: mol_type = other RNA
ggttgatgacaaggcggcac

SEQ ID NO: 3106 - RNA, 20 nt, synthetic construct
  source 1..20: mol_type = other RNA
ggttttcactgacagcgtga

SEQ ID NO: 3107 - RNA, 20 nt, synthetic construct
  source 1..20: mol_type = other RNA
gtaatggaaccccaatacca

SEQ ID NO: 3108 - RNA, 20 nt, synthetic construct
  source 1..20: mol_type = other RNA
gtacaaagggctgcaccagt

SEQ ID NO: 3109 - RNA, 20 nt, synthetic construct
  source 1..20: mol_type = other RNA
gtacacctaaaactggtgca

SEQ ID NO: 3110 - RNA, 20 nt, synthetic construct
  source 1..20: mol_type = other RNA
gtacagcagtggctggtgga

SEQ ID NO: 3111 - RNA, 20 nt, synthetic construct
  source 1..20: mol_type = other RNA
gtacagtcagagctggaagg

SEQ ID NO: 3112 - RNA, 20 nt, synthetic construct
  source 1..20: mol_type = other RNA
gtacattggtggggccacga

SEQ ID NO: 3113 - RNA, 20 nt, synthetic construct
  source 1..20: mol_type = other RNA
gtaccccttccagctctgac

SEQ ID NO: 3114 - RNA, 20 nt, synthetic construct
  source 1..20: mol_type = other RNA
gtacgcagaagcagtgcccg

SEQ ID NO: 3115 - RNA, 20 nt, synthetic construct
  source 1..20: mol_type = other RNA
gtacgcattgagtatgccga

SEQ ID NO: 3116 - RNA, 20 nt, synthetic construct
  source 1..20: mol_type = other RNA
gtacggggcaatctgcccac

SEQ ID NO: 3117 - RNA, 20 nt, synthetic construct
  source 1..20: mol_type = other RNA
gtacgtgacagcacgcaccc

SEQ ID NO: 3118 - RNA, 20 nt, synthetic construct
  source 1..20: mol_type = other RNA
gtactaagaacgtgccttct

SEQ ID NO: 3119 - RNA, 20 nt, synthetic construct
  source 1..20: mol_type = other RNA
gtactgtcggaggtagtcgg

SEQ ID NO: 3120 - RNA, 20 nt, synthetic construct
  source 1..20: mol_type = other RNA
gtagctggggtgcgtgctgt

SEQ ID NO: 3121 - RNA, 20 nt, synthetic construct
  source 1..20: mol_type = other RNA
gtagtcggccatgcgccggg

SEQ ID NO: 3122 - RNA, 20 nt, synthetic construct
  source 1..20: mol_type = other RNA
gtatcagcagtgcaggaggc

SEQ ID NO: 3123 - RNA, 20 nt, synthetic construct
  source 1..20: mol_type = other RNA
gtatgccgactccagcttcc

SEQ ID NO: 3124 - RNA, 20 nt, synthetic construct
  source 1..20: mol_type = other RNA
gtattggggttccattacgg

SEQ ID NO: 3125 - RNA, 20 nt, synthetic construct
  source 1..20: mol_type = other RNA
gtcacgtactaagaacgtgc

SEQ ID NO: 3126 - RNA, 20 nt, synthetic construct
  source 1..20: mol_type = other RNA
gtcactaggcgcatcctcct

SEQ ID NO: 3127 - RNA, 20 nt, synthetic construct
  source 1..20: mol_type = other RNA
gtcagagctggaaggggtac

SEQ ID NO: 3128 - RNA, 20 nt, synthetic construct
  source 1..20: mol_type = other RNA
gtcagccttgtgcagcacta

SEQ ID NO: 3129 - RNA, 20 nt, synthetic construct
  source 1..20: mol_type = other RNA
gtcagtgaaaaccactcgtg

SEQ ID NO: 3130 - RNA, 20 nt, synthetic construct
  source 1..20: mol_type = other RNA
gtcatcaaccgtctggtggc

SEQ ID NO: 3131 - RNA, 20 nt, synthetic construct
  source 1..20: mol_type = other RNA
gtccacgtcggccaccagac

SEQ ID NO: 3132 - RNA, 20 nt, synthetic construct
  source 1..20: mol_type = other RNA
gtccagacggaagctggagt

SEQ ID NO: 3133 - RNA, 20 nt, synthetic construct
  source 1..20: mol_type = other RNA
gtccaggccacgcatcctgg

SEQ ID NO: 3134 - RNA, 20 nt, synthetic construct
  source 1..20: mol_type = other RNA
gtcccttggccccctctgca

SEQ ID NO: 3135 - RNA, 20 nt, synthetic construct
  source 1..20: mol_type = other RNA
gtcgcttcgggtatcagcag

SEQ ID NO: 3136 - RNA, 20 nt, synthetic construct
  source 1..20: mol_type = other RNA
gtcggaggtagtcggccatg

SEQ ID NO: 3137 - RNA, 20 nt, synthetic construct
  source 1..20: mol_type = other RNA
gtcggcatactcaatgcgta

SEQ ID NO: 3138 - RNA, 20 nt, synthetic construct
  source 1..20: mol_type = other RNA
gtcggccaccagacggttga

SEQ ID NO: 3139 - RNA, 20 nt, synthetic construct
  source 1..20: mol_type = other RNA
gtcggccatgcgccggggca

SEQ ID NO: 3140 - RNA, 20 nt, synthetic construct
  source 1..20: mol_type = other RNA
gtcgggcctcgctggccgta

SEQ ID NO: 3141 - RNA, 20 nt, synthetic construct
  source 1..20: mol_type = other RNA
gtctggactccaactgcttg

SEQ ID NO: 3142 - RNA, 20 nt, synthetic construct
  source 1..20: mol_type = other RNA
gtctggtggccgacgtggac

SEQ ID NO: 3143 - RNA, 20 nt, synthetic construct
  source 1..20: mol_type = other RNA
gtgaaaaccactcgtggccc

SEQ ID NO: 3144 - RNA, 20 nt, synthetic construct
  source 1..20: mol_type = other RNA
gtgaacaggtagctggggtg

SEQ ID NO: 3145 - RNA, 20 nt, synthetic construct
  source 1..20: mol_type = other RNA
gtgacagcacgcaccccagc

SEQ ID NO: 3146 - RNA, 20 nt, synthetic construct
  source 1..20: mol_type = other RNA
gtgacccagcactgcctgct

SEQ ID NO: 3147 - RNA, 20 nt, synthetic construct
  source 1..20: mol_type = other RNA
gtgagggtgggcagattgcc

SEQ ID NO: 3148 - RNA, 20 nt, synthetic construct
  source 1..20: mol_type = other RNA
gtgcagcactatgtggcctc

SEQ ID NO: 3149 - RNA, 20 nt, synthetic construct
  source 1..20: mol_type = other RNA
gtgcagccctttgtacgcag

SEQ ID NO: 3150 - RNA, 20 nt, synthetic construct
  source 1..20: mol_type = other RNA
gtgcaggaggccacatagtg

SEQ ID NO: 3151 - RNA, 20 nt, synthetic construct
  source 1..20: mol_type = other RNA
gtgcccgcagcctgcaacac

SEQ ID NO: 3152 - RNA, 20 nt, synthetic construct
  source 1..20: mol_type = other RNA
gtgccgccttgtcatcaacc

SEQ ID NO: 3153 - RNA, 20 nt, synthetic construct
  source 1..20: mol_type = other RNA
gtgccttctggcatcttctg

SEQ ID NO: 3154 - RNA, 20 nt, synthetic construct
  source 1..20: mol_type = other RNA
gtgcgtgctgtcacgtacta

SEQ ID NO: 3155 - RNA, 20 nt, synthetic construct
  source 1..20: mol_type = other RNA
gtgctgcacaaggctgacca

SEQ ID NO: 3156 - RNA, 20 nt, synthetic construct
  source 1..20: mol_type = other RNA
gtgctgggtcactaggcgca

SEQ ID NO: 3157 - RNA, 20 nt, synthetic construct
  source 1..20: mol_type = other RNA
gtgctgtcacgtactaagaa

SEQ ID NO: 3158 - RNA, 20 nt, synthetic construct
  source 1..20: mol_type = other RNA
gtggactgcctgccactgcc

SEQ ID NO: 3159 - RNA, 20 nt, synthetic construct
  source 1..20: mol_type = other RNA
gtggaggagcaggcagtgct

SEQ ID NO: 3160 - RNA, 20 nt, synthetic construct
  source 1..20: mol_type = other RNA
gtggcaggcagtccacgtcg

SEQ ID NO: 3161 - RNA, 20 nt, synthetic construct
  source 1..20: mol_type = other RNA
gtggccccaccaatgtacgc

SEQ ID NO: 3162 - RNA, 20 nt, synthetic construct
  source 1..20: mol_type = other RNA
gtggccgacgtggactgcct

SEQ ID NO: 3163 - RNA, 20 nt, synthetic construct
  source 1..20: mol_type = other RNA
gtggcctcctgcactgctga

SEQ ID NO: 3164 - RNA, 20 nt, synthetic construct
  source 1..20: mol_type = other RNA
gtggcctggacaagcagttg

SEQ ID NO: 3165 - RNA, 20 nt, synthetic construct
  source 1..20: mol_type = other RNA
gtggctggtggaggagcagg

SEQ ID NO: 3166 - RNA, 20 nt, synthetic construct
  source 1..20: mol_type = other RNA
gtgggagcaggatcggggct

SEQ ID NO: 3167 - RNA, 20 nt, synthetic construct
  source 1..20: mol_type = other RNA
gtgggcagattgccccgtac

SEQ ID NO: 3168 - RNA, 20 nt, synthetic construct
  source 1..20: mol_type = other RNA
gtggggccacgagtggtttt

SEQ ID NO: 3169 - RNA, 20 nt, synthetic construct
  source 1..20: mol_type = other RNA
gtggtcagccttgtgcagca

SEQ ID NO: 3170 - RNA, 20 nt, synthetic construct
  source 1..20: mol_type = other RNA
gtggttttcactgacagcgt

SEQ ID NO: 3171 - RNA, 20 nt, synthetic construct
  source 1..20: mol_type = other RNA
gtgtacagcagtggctggtg

SEQ ID NO: 3172 - RNA, 20 nt, synthetic construct
  source 1..20: mol_type = other RNA
gtgttgcaggctgcgggcac

SEQ ID NO: 3173 - RNA, 20 nt, synthetic construct
  source 1..20: mol_type = other RNA
gtgttgtcgggcctcgctgg

SEQ ID NO: 3174 - RNA, 20 nt, synthetic construct
  source 1..20: mol_type = other RNA
gttcacgctgtcagtgaaaa

SEQ ID NO: 3175 - RNA, 20 nt, synthetic construct
  source 1..20: mol_type = other RNA
gttccattacggccagcgag

SEQ ID NO: 3176 - RNA, 20 nt, synthetic construct
  source 1..20: mol_type = other RNA
gttcttagtacgtgacagca

SEQ ID NO: 3177 - RNA, 20 nt, synthetic construct
  source 1..20: mol_type = other RNA
gttgatgacaaggcggcaca

SEQ ID NO: 3178 - RNA, 20 nt, synthetic construct
  source 1..20: mol_type = other RNA
gttgcaggctgcgggcactg

SEQ ID NO: 3179 - RNA, 20 nt, synthetic construct
  source 1..20: mol_type = other RNA
gttggagtccagacggaagc

SEQ ID NO: 3180 - RNA, 20 nt, synthetic construct
  source 1..20: mol_type = other RNA
gttgtcgggcctcgctggcc

SEQ ID NO: 3181 - RNA, 20 nt, synthetic construct
  source 1..20: mol_type = other RNA
gttttaggtgtacagcagtg

SEQ ID NO: 3182 - RNA, 20 nt, synthetic construct
  source 1..20: mol_type = other RNA
gttttcactgacagcgtgaa

SEQ ID NO: 3183 - RNA, 20 nt, synthetic construct
  source 1..20: mol_type = other RNA
taaaactggtgcagcccttt

SEQ ID NO: 3184 - RNA, 20 nt, synthetic construct
  source 1..20: mol_type = other RNA
taagaacgtgccttctggca

SEQ ID NO: 3185 - RNA, 20 nt, synthetic construct
  source 1..20: mol_type = other RNA
taaggaggatgcgcctagtg

SEQ ID NO: 3186 - RNA, 20 nt, synthetic construct
  source 1..20: mol_type = other RNA
taatggaaccccaataccag

SEQ ID NO: 3187 - RNA, 20 nt, synthetic construct
  source 1..20: mol_type = other RNA
tacaaagggctgcaccagtt

SEQ ID NO: 3188 - RNA, 20 nt, synthetic construct
  source 1..20: mol_type = other RNA
tacacctaaaactggtgcag

SEQ ID NO: 3189 - RNA, 20 nt, synthetic construct
  source 1..20: mol_type = other RNA
tacagcagtggctggtggag

SEQ ID NO: 3190 - RNA, 20 nt, synthetic construct
  source 1..20: mol_type = other RNA
tacagtcagagctggaaggg

SEQ ID NO: 3191 - RNA, 20 nt, synthetic construct
  source 1..20: mol_type = other RNA
tacattggtggggccacgag

SEQ ID NO: 3192 - RNA, 20 nt, synthetic construct
  source 1..20: mol_type = other RNA
taccagcctaggcaagtgca

SEQ ID NO: 3193 - RNA, 20 nt, synthetic construct
  source 1..20: mol_type = other RNA
taccccttccagctctgact

SEQ ID NO: 3194 - RNA, 20 nt, synthetic construct
  source 1..20: mol_type = other RNA
tacccgaagcgacagccccg

SEQ ID NO: 3195 - RNA, 20 nt, synthetic construct
  source 1..20: mol_type = other RNA
tacctccgacagtacccctt

SEQ ID NO: 3196 - RNA, 20 nt, synthetic construct
  source 1..20: mol_type = other RNA
tacctgttcacgctgtcagt

SEQ ID NO: 3197 - RNA, 20 nt, synthetic construct
  source 1..20: mol_type = other RNA
tacgcagaagcagtgcccgc

SEQ ID NO: 3198 - RNA, 20 nt, synthetic construct
  source 1..20: mol_type = other RNA
tacgcattgagtatgccgac

SEQ ID NO: 3199 - RNA, 20 nt, synthetic construct
  source 1..20: mol_type = other RNA
tacggccagcgaggcccgac

SEQ ID NO: 3200 - RNA, 20 nt, synthetic construct
  source 1..20: mol_type = other RNA
tacggggcaatctgcccacc

SEQ ID NO: 3201 - RNA, 20 nt, synthetic construct
  source 1..20: mol_type = other RNA
tacgtgacagcacgcacccc

SEQ ID NO: 3202 - RNA, 20 nt, synthetic construct
  source 1..20: mol_type = other RNA
tactaagaacgtgccttctg

SEQ ID NO: 3203 - RNA, 20 nt, synthetic construct
  source 1..20: mol_type = other RNA
tactcaatgcgtacattggt

SEQ ID NO: 3204 - RNA, 20 nt, synthetic construct
  source 1..20: mol_type = other RNA
tactgtcggaggtagtcggc

SEQ ID NO: 3205 - RNA, 20 nt, synthetic construct
  source 1..20: mol_type = other RNA
tagctggggtgcgtgctgtc

SEQ ID NO: 3206 - RNA, 20 nt, synthetic construct
  source 1..20: mol_type = other RNA
taggcaagtgcagagggggc

SEQ ID NO: 3207 - RNA, 20 nt, synthetic construct
  source 1..20: mol_type = other RNA
taggcagggccggggtggga

SEQ ID NO: 3208 - RNA, 20 nt, synthetic construct
  source 1..20: mol_type = other RNA
taggcataggcagggccggg

SEQ ID NO: 3209 - RNA, 20 nt, synthetic construct
  source 1..20: mol_type = other RNA
taggcgcatcctccttaggc

SEQ ID NO: 3210 - RNA, 20 nt, synthetic construct
  source 1..20: mol_type = other RNA
taggctggtattggggttcc

SEQ ID NO: 3211 - RNA, 20 nt, synthetic construct
  source 1..20: mol_type = other RNA
taggtgtacagcagtggctg

SEQ ID NO: 3212 - RNA, 20 nt, synthetic construct
  source 1..20: mol_type = other RNA
tagtacgtgacagcacgcac

SEQ ID NO: 3213 - RNA, 20 nt, synthetic construct
  source 1..20: mol_type = other RNA
tagtcggccatgcgccgggg

SEQ ID NO: 3214 - RNA, 20 nt, synthetic construct
  source 1..20: mol_type = other RNA
tagtgacccagcactgcctg

SEQ ID NO: 3215 - RNA, 20 nt, synthetic construct
  source 1..20: mol_type = other RNA
tagtgctgcacaaggctgac

SEQ ID NO: 3216 - RNA, 20 nt, synthetic construct
  source 1..20: mol_type = other RNA
tatcagcagtgcaggaggcc

SEQ ID NO: 3217 - RNA, 20 nt, synthetic construct
  source 1..20: mol_type = other RNA
tatgccgactccagcttccg

SEQ ID NO: 3218 - RNA, 20 nt, synthetic construct
  source 1..20: mol_type = other RNA
tatgcctaaggaggatgcgc

SEQ ID NO: 3219 - RNA, 20 nt, synthetic construct
  source 1..20: mol_type = other RNA
tatgtggcctcctgcactgc

SEQ ID NO: 3220 - RNA, 20 nt, synthetic construct
  source 1..20: mol_type = other RNA
tattggggttccattacggc

SEQ ID NO: 3221 - RNA, 20 nt, synthetic construct
  source 1..20: mol_type = other RNA
tcaaccgtctggtggccgac

SEQ ID NO: 3222 - RNA, 20 nt, synthetic construct
  source 1..20: mol_type = other RNA
tcaatgcgtacattggtggg

SEQ ID NO: 3223 - RNA, 20 nt, synthetic construct
  source 1..20: mol_type = other RNA
tcacgctgtcagtgaaaacc

SEQ ID NO: 3224 - RNA, 20 nt, synthetic construct
  source 1..20: mol_type = other RNA
tcacgtactaagaacgtgcc

SEQ ID NO: 3225 - RNA, 20 nt, synthetic construct
  source 1..20: mol_type = other RNA
tcactaggcgcatcctcctt

SEQ ID NO: 3226 - RNA, 20 nt, synthetic construct
  source 1..20: mol_type = other RNA
tcactgacagcgtgaacagg

SEQ ID NO: 3227 - RNA, 20 nt, synthetic construct
  source 1..20: mol_type = other RNA
tcagagctggaaggggtact

SEQ ID NO: 3228 - RNA, 20 nt, synthetic construct
  source 1..20: mol_type = other RNA
tcagcagtgcaggaggccac

SEQ ID NO: 3229 - RNA, 20 nt, synthetic construct
  source 1..20: mol_type = other RNA
tcagccttgtgcagcactat

SEQ ID NO: 3230 - RNA, 20 nt, synthetic construct
  source 1..20: mol_type = other RNA
tcagtgaaaaccactcgtgg

SEQ ID NO: 3231 - RNA, 20 nt, synthetic construct
  source 1..20: mol_type = other RNA
tcatcaaccgtctggtggcc

SEQ ID NO: 3232 - RNA, 20 nt, synthetic construct
  source 1..20: mol_type = other RNA
tccaactgcttgtccaggcc

SEQ ID NO: 3233 - RNA, 20 nt, synthetic construct
  source 1..20: mol_type = other RNA
tccaccagccactgctgtac

SEQ ID NO: 3234 - RNA, 20 nt, synthetic construct
  source 1..20: mol_type = other RNA
tccacgtcggccaccagacg

SEQ ID NO: 3235 - RNA, 20 nt, synthetic construct
  source 1..20: mol_type = other RNA
tccagacggaagctggagtc

SEQ ID NO: 3236 - RNA, 20 nt, synthetic construct
  source 1..20: mol_type = other RNA
tccagctctgactgtacggg

SEQ ID NO: 3237 - RNA, 20 nt, synthetic construct
  source 1..20: mol_type = other RNA
tccagcttccgtctggactc

SEQ ID NO: 3238 - RNA, 20 nt, synthetic construct
  source 1..20: mol_type = other RNA
tccaggccacgcatcctggc

SEQ ID NO: 3239 - RNA, 20 nt, synthetic construct
  source 1..20: mol_type = other RNA
tccattacggccagcgaggc

SEQ ID NO: 3240 - RNA, 20 nt, synthetic construct
  source 1..20: mol_type = other RNA
tcccaccccggccctgccta

SEQ ID NO: 3241 - RNA, 20 nt, synthetic construct
  source 1..20: mol_type = other RNA
tcccttggccccctctgcac

SEQ ID NO: 3242 - RNA, 20 nt, synthetic construct
  source 1..20: mol_type = other RNA
tccgacagtaccccttccag

SEQ ID NO: 3243 - RNA, 20 nt, synthetic construct
  source 1..20: mol_type = other RNA
tccggaaaggccaggatgcg

SEQ ID NO: 3244 - RNA, 20 nt, synthetic construct
  source 1..20: mol_type = other RNA
tccggatgtggtcagccttg

SEQ ID NO: 3245 - RNA, 20 nt, synthetic construct
  source 1..20: mol_type = other RNA
tccgtctggactccaactgc

SEQ ID NO: 3246 - RNA, 20 nt, synthetic construct
  source 1..20: mol_type = other RNA
tcctccaccagccactgctg

SEQ ID NO: 3247 - RNA, 20 nt, synthetic construct
  source 1..20: mol_type = other RNA
tcctccttaggcataggcag

SEQ ID NO: 3248 - RNA, 20 nt, synthetic construct
  source 1..20: mol_type = other RNA
tcctgcactgctgatacccg

SEQ ID NO: 3249 - RNA, 20 nt, synthetic construct
  source 1..20: mol_type = other RNA
tcctgctcccaccccggccc

SEQ ID NO: 3250 - RNA, 20 nt, synthetic construct
  source 1..20: mol_type = other RNA
tcctggcctttccggatgtg

SEQ ID NO: 3251 - RNA, 20 nt, synthetic construct
  source 1..20: mol_type = other RNA
tccttaggcataggcagggc

SEQ ID NO: 3252 - RNA, 20 nt, synthetic construct
  source 1..20: mol_type = other RNA
tcgctggccgtaatggaacc

SEQ ID NO: 3253 - RNA, 20 nt, synthetic construct
  source 1..20: mol_type = other RNA
tcgcttcgggtatcagcagt

SEQ ID NO: 3254 - RNA, 20 nt, synthetic construct
  source 1..20: mol_type = other RNA
tcggaggtagtcggccatgc

SEQ ID NO: 3255 - RNA, 20 nt, synthetic construct
  source 1..20: mol_type = other RNA
tcggcatactcaatgcgtac

SEQ ID NO: 3256 - RNA, 20 nt, synthetic construct
  source 1..20: mol_type = other RNA
tcggccaccagacggttgat

SEQ ID NO: 3257 - RNA, 20 nt, synthetic construct
  source 1..20: mol_type = other RNA
tcggccatgcgccggggcag

SEQ ID NO: 3258 - RNA, 20 nt, synthetic construct
  source 1..20: mol_type = other RNA
tcgggcctcgctggccgtaa

SEQ ID NO: 3259 - RNA, 20 nt, synthetic construct
  source 1..20: mol_type = other RNA
tcggggctgtcgcttcgggt

SEQ ID NO: 3260 - RNA, 20 nt, synthetic construct
  source 1..20: mol_type = other RNA
tcgggtatcagcagtgcagg

SEQ ID NO: 3261 - RNA, 20 nt, synthetic construct
  source 1..20: mol_type = other RNA
tcgtggccccaccaatgtac

SEQ ID NO: 3262 - RNA, 20 nt, synthetic construct
  source 1..20: mol_type = other RNA
tctgactgtacggggcaatc

SEQ ID NO: 3263 - RNA, 20 nt, synthetic construct
  source 1..20: mol_type = other RNA
tctgcacttgcctaggctgg

SEQ ID NO: 3264 - RNA, 20 nt, synthetic construct
  source 1..20: mol_type = other RNA
tctgcaggtgttgtcgggcc

SEQ ID NO: 3265 - RNA, 20 nt, synthetic construct
  source 1..20: mol_type = other RNA
tctgcgtacaaagggctgca

SEQ ID NO: 3266 - RNA, 20 nt, synthetic construct
  source 1..20: mol_type = other RNA
tctggactccaactgcttgt

SEQ ID NO: 3267 - RNA, 20 nt, synthetic construct
  source 1..20: mol_type = other RNA
tctggcatcttctgcaggtg

SEQ ID NO: 3268 - RNA, 20 nt, synthetic construct
  source 1..20: mol_type = other RNA
tctggtggccgacgtggact

SEQ ID NO: 3269 - RNA, 20 nt, synthetic construct
  source 1..20: mol_type = other RNA
tcttagtacgtgacagcacg

SEQ ID NO: 3270 - RNA, 20 nt, synthetic construct
  source 1..20: mol_type = other RNA
tcttctgcaggtgttgtcgg

SEQ ID NO: 3271 - RNA, 20 nt, synthetic construct
  source 1..20: mol_type = other RNA
tgaaaaccactcgtggcccc

SEQ ID NO: 3272 - RNA, 20 nt, synthetic construct
  source 1..20: mol_type = other RNA
tgaacaggtagctggggtgc

SEQ ID NO: 3273 - RNA, 20 nt, synthetic construct
  source 1..20: mol_type = other RNA
tgacaaggcggcacaggtgt

SEQ ID NO: 3274 - RNA, 20 nt, synthetic construct
  source 1..20: mol_type = other RNA
tgacagcacgcaccccagct

SEQ ID NO: 3275 - RNA, 20 nt, synthetic construct
  source 1..20: mol_type = other RNA
tgacagcgtgaacaggtagc

SEQ ID NO: 3276 - RNA, 20 nt, synthetic construct
  source 1..20: mol_type = other RNA
tgaccacatccggaaaggcc

SEQ ID NO: 3277 - RNA, 20 nt, synthetic construct
  source 1..20: mol_type = other RNA
tgacccagcactgcctgctc

SEQ ID NO: 3278 - RNA, 20 nt, synthetic construct
  source 1..20: mol_type = other RNA
tgactgtacggggcaatctg

SEQ ID NO: 3279 - RNA, 20 nt, synthetic construct
  source 1..20: mol_type = other RNA
tgagggtgggcagattgccc

SEQ ID NO: 3280 - RNA, 20 nt, synthetic construct
  source 1..20: mol_type = other RNA
tgagtatgccgactccagct

SEQ ID NO: 3281 - RNA, 20 nt, synthetic construct
  source 1..20: mol_type = other RNA
tgatacccgaagcgacagcc

SEQ ID NO: 3282 - RNA, 20 nt, synthetic construct
  source 1..20: mol_type = other RNA
tgatgacaaggcggcacagg

SEQ ID NO: 3283 - RNA, 20 nt, synthetic construct
  source 1..20: mol_type = other RNA
tgcaacacctgtgccgcctt

SEQ ID NO: 3284 - RNA, 20 nt, synthetic construct
  source 1..20: mol_type = other RNA
tgcacaaggctgaccacatc

SEQ ID NO: 3285 - RNA, 20 nt, synthetic construct
  source 1..20: mol_type = other RNA
tgcaccagttttaggtgtac

SEQ ID NO: 3286 - RNA, 20 nt, synthetic construct
  source 1..20: mol_type = other RNA
tgcactgctgatacccgaag

SEQ ID NO: 3287 - RNA, 20 nt, synthetic construct
  source 1..20: mol_type = other RNA
tgcacttgcctaggctggta

SEQ ID NO: 3288 - RNA, 20 nt, synthetic construct
  source 1..20: mol_type = other RNA
tgcagaagatgccagaaggc

SEQ ID NO: 3289 - RNA, 20 nt, synthetic construct
  source 1..20: mol_type = other RNA
tgcagcactatgtggcctcc

SEQ ID NO: 3290 - RNA, 20 nt, synthetic construct
  source 1..20: mol_type = other RNA
tgcagccctttgtacgcaga

SEQ ID NO: 3291 - RNA, 20 nt, synthetic construct
  source 1..20: mol_type = other RNA
tgcaggaggccacatagtgc

SEQ ID NO: 3292 - RNA, 20 nt, synthetic construct
  source 1..20: mol_type = other RNA
tgcaggctgcgggcactgct

SEQ ID NO: 3293 - RNA, 20 nt, synthetic construct
  source 1..20: mol_type = other RNA
tgcaggtgttgtcgggcctc

SEQ ID NO: 3294 - RNA, 20 nt, synthetic construct
  source 1..20: mol_type = other RNA
tgccactgccccggcgcatg

SEQ ID NO: 3295 - RNA, 20 nt, synthetic construct
  source 1..20: mol_type = other RNA
tgccagaaggcacgttctta

SEQ ID NO: 3296 - RNA, 20 nt, synthetic construct
  source 1..20: mol_type = other RNA
tgccccggcgcatggccgac

SEQ ID NO: 3297 - RNA, 20 nt, synthetic construct
  source 1..20: mol_type = other RNA
tgccccgtacagtcagagct

SEQ ID NO: 3298 - RNA, 20 nt, synthetic construct
  source 1..20: mol_type = other RNA
tgcccgcagcctgcaacacc

SEQ ID NO: 3299 - RNA, 20 nt, synthetic construct
  source 1..20: mol_type = other RNA
tgccgactccagcttccgtc

SEQ ID NO: 3300 - RNA, 20 nt, synthetic construct
  source 1..20: mol_type = other RNA
tgccgccttgtcatcaaccg

SEQ ID NO: 3301 - RNA, 20 nt, synthetic construct
  source 1..20: mol_type = other RNA
tgcctaaggaggatgcgcct

SEQ ID NO: 3302 - RNA, 20 nt, synthetic construct
  source 1..20: mol_type = other RNA
tgcctaggctggtattgggg

SEQ ID NO: 3303 - RNA, 20 nt, synthetic construct
  source 1..20: mol_type = other RNA
tgcctatgcctaaggaggat

SEQ ID NO: 3304 - RNA, 20 nt, synthetic construct
  source 1..20: mol_type = other RNA
tgcctgccactgccccggcg

SEQ ID NO: 3305 - RNA, 20 nt, synthetic construct
  source 1..20: mol_type = other RNA
tgcctgctcctccaccagcc

SEQ ID NO: 3306 - RNA, 20 nt, synthetic construct
  source 1..20: mol_type = other RNA
tgccttctggcatcttctgc

SEQ ID NO: 3307 - RNA, 20 nt, synthetic construct
  source 1..20: mol_type = other RNA
tgcgccggggcagtggcagg

SEQ ID NO: 3308 - RNA, 20 nt, synthetic construct
  source 1..20: mol_type = other RNA
tgcgcctagtgacccagcac

SEQ ID NO: 3309 - RNA, 20 nt, synthetic construct
  source 1..20: mol_type = other RNA
tgcgggcactgcttctgcgt

SEQ ID NO: 3310 - RNA, 20 nt, synthetic construct
  source 1..20: mol_type = other RNA
tgcgtacaaagggctgcacc

SEQ ID NO: 3311 - RNA, 20 nt, synthetic construct
  source 1..20: mol_type = other RNA
tgcgtacattggtggggcca

SEQ ID NO: 3312 - RNA, 20 nt, synthetic construct
  source 1..20: mol_type = other RNA
tgcgtgctgtcacgtactaa

SEQ ID NO: 3313 - RNA, 20 nt, synthetic construct
  source 1..20: mol_type = other RNA
tgcgtggcctggacaagcag

SEQ ID NO: 3314 - RNA, 20 nt, synthetic construct
  source 1..20: mol_type = other RNA
tgctcccaccccggccctgc

SEQ ID NO: 3315 - RNA, 20 nt, synthetic construct
  source 1..20: mol_type = other RNA
tgctcctccaccagccactg

SEQ ID NO: 3316 - RNA, 20 nt, synthetic construct
  source 1..20: mol_type = other RNA
tgctgatacccgaagcgaca

SEQ ID NO: 3317 - RNA, 20 nt, synthetic construct
  source 1..20: mol_type = other RNA
tgctgcacaaggctgaccac

SEQ ID NO: 3318 - RNA, 20 nt, synthetic construct
  source 1..20: mol_type = other RNA
tgctgggtcactaggcgcat

SEQ ID NO: 3319 - RNA, 20 nt, synthetic construct
  source 1..20: mol_type = other RNA
tgctgtacacctaaaactgg

SEQ ID NO: 3320 - RNA, 20 nt, synthetic construct
  source 1..20: mol_type = other RNA
tgctgtcacgtactaagaac

SEQ ID NO: 3321 - RNA, 20 nt, synthetic construct
  source 1..20: mol_type = other RNA
tgcttctgcgtacaaagggc

SEQ ID NO: 3322 - RNA, 20 nt, synthetic construct
  source 1..20: mol_type = other RNA
tgcttgtccaggccacgcat

SEQ ID NO: 3323 - RNA, 20 nt, synthetic construct
  source 1..20: mol_type = other RNA
tggaaccccaataccagcct

SEQ ID NO: 3324 - RNA, 20 nt, synthetic construct
  source 1..20: mol_type = other RNA
tggaaggggtactgtcggag

SEQ ID NO: 3325 - RNA, 20 nt, synthetic construct
  source 1..20: mol_type = other RNA
tggacaagcagttggagtcc

SEQ ID NO: 3326 - RNA, 20 nt, synthetic construct
  source 1..20: mol_type = other RNA
tggactccaactgcttgtcc

SEQ ID NO: 3327 - RNA, 20 nt, synthetic construct
  source 1..20: mol_type = other RNA
tggactgcctgccactgccc

SEQ ID NO: 3328 - RNA, 20 nt, synthetic construct
  source 1..20: mol_type = other RNA
tggaggagcaggcagtgctg

SEQ ID NO: 3329 - RNA, 20 nt, synthetic construct
  source 1..20: mol_type = other RNA
tggagtccagacggaagctg

SEQ ID NO: 3330 - RNA, 20 nt, synthetic construct
  source 1..20: mol_type = other RNA
tggagtcggcatactcaatg

SEQ ID NO: 3331 - RNA, 20 nt, synthetic construct
  source 1..20: mol_type = other RNA
tggcaggcagtccacgtcgg

SEQ ID NO: 3332 - RNA, 20 nt, synthetic construct
  source 1..20: mol_type = other RNA
tggcatcttctgcaggtgtt

SEQ ID NO: 3333 - RNA, 20 nt, synthetic construct
  source 1..20: mol_type = other RNA
tggccccaccaatgtacgca

SEQ ID NO: 3334 - RNA, 20 nt, synthetic construct
  source 1..20: mol_type = other RNA
tggccccctctgcacttgcc

SEQ ID NO: 3335 - RNA, 20 nt, synthetic construct
  source 1..20: mol_type = other RNA
tggccgacgtggactgcctg

SEQ ID NO: 3336 - RNA, 20 nt, synthetic construct
  source 1..20: mol_type = other RNA
tggccgactacctccgacag

SEQ ID NO: 3337 - RNA, 20 nt, synthetic construct
  source 1..20: mol_type = other RNA
tggccgtaatggaaccccaa

SEQ ID NO: 3338 - RNA, 20 nt, synthetic construct
  source 1..20: mol_type = other RNA
tggcctcctgcactgctgat

SEQ ID NO: 3339 - RNA, 20 nt, synthetic construct
  source 1..20: mol_type = other RNA
tggcctggacaagcagttgg

SEQ ID NO: 3340 - RNA, 20 nt, synthetic construct
  source 1..20: mol_type = other RNA
tggcctttccggatgtggtc

SEQ ID NO: 3341 - RNA, 20 nt, synthetic construct
  source 1..20: mol_type = other RNA
tggctggtggaggagcaggc

SEQ ID NO: 3342 - RNA, 20 nt, synthetic construct
  source 1..20: mol_type = other RNA
tgggagcaggatcggggctg

SEQ ID NO: 3343 - RNA, 20 nt, synthetic construct
  source 1..20: mol_type = other RNA
tgggcagattgccccgtaca

SEQ ID NO: 3344 - RNA, 20 nt, synthetic construct
  source 1..20: mol_type = other RNA
tggggccacgagtggttttc

SEQ ID NO: 3345 - RNA, 20 nt, synthetic construct
  source 1..20: mol_type = other RNA
tggggtgcgtgctgtcacgt

SEQ ID NO: 3346 - RNA, 20 nt, synthetic construct
  source 1..20: mol_type = other RNA
tggggttccattacggccag

SEQ ID NO: 3347 - RNA, 20 nt, synthetic construct
  source 1..20: mol_type = other RNA
tgggtcactaggcgcatcct

SEQ ID NO: 3348 - RNA, 20 nt, synthetic construct
  source 1..20: mol_type = other RNA
tgggtgagggtgggcagatt

SEQ ID NO: 3349 - RNA, 20 nt, synthetic construct
  source 1..20: mol_type = other RNA
tggtattggggttccattac

SEQ ID NO: 3350 - RNA, 20 nt, synthetic construct
  source 1..20: mol_type = other RNA
tggtcagccttgtgcagcac

SEQ ID NO: 3351 - RNA, 20 nt, synthetic construct
  source 1..20: mol_type = other RNA
tggtgcagccctttgtacgc

SEQ ID NO: 3352 - RNA, 20 nt, synthetic construct
  source 1..20: mol_type = other RNA
tggtggaggagcaggcagtg

SEQ ID NO: 3353 - RNA, 20 nt, synthetic construct
  source 1..20: mol_type = other RNA
tggtggccgacgtggactgc

SEQ ID NO: 3354 - RNA, 20 nt, synthetic construct
  source 1..20: mol_type = other RNA
tggtggggccacgagtggtt

SEQ ID NO: 3355 - RNA, 20 nt, synthetic construct
  source 1..20: mol_type = other RNA
tggttttcactgacagcgtg

SEQ ID NO: 3356 - RNA, 20 nt, synthetic construct
  source 1..20: mol_type = other RNA
tgtacacctaaaactggtgc

SEQ ID NO: 3357 - RNA, 20 nt, synthetic construct
  source 1..20: mol_type = other RNA
tgtacagcagtggctggtgg

SEQ ID NO: 3358 - RNA, 20 nt, synthetic construct
  source 1..20: mol_type = other RNA
tgtacgcagaagcagtgccc

SEQ ID NO: 3359 - RNA, 20 nt, synthetic construct
  source 1..20: mol_type = other RNA
tgtacgcattgagtatgccg

SEQ ID NO: 3360 - RNA, 20 nt, synthetic construct
  source 1..20: mol_type = other RNA
tgtacggggcaatctgccca

SEQ ID NO: 3361 - RNA, 20 nt, synthetic construct
  source 1..20: mol_type = other RNA
tgtcacgtactaagaacgtg

SEQ ID NO: 3362 - RNA, 20 nt, synthetic construct
  source 1..20: mol_type = other RNA
tgtcagtgaaaaccactcgt

SEQ ID NO: 3363 - RNA, 20 nt, synthetic construct
  source 1..20: mol_type = other RNA
tgtcatcaaccgtctggtgg

SEQ ID NO: 3364 - RNA, 20 nt, synthetic construct
  source 1..20: mol_type = other RNA
tgtccaggccacgcatcctg

SEQ ID NO: 3365 - RNA, 20 nt, synthetic construct
  source 1..20: mol_type = other RNA
tgtcccttggccccctctgc

SEQ ID NO: 3366 - RNA, 20 nt, synthetic construct
  source 1..20: mol_type = other RNA
tgtcgcttcgggtatcagca

SEQ ID NO: 3367 - RNA, 20 nt, synthetic construct
  source 1..20: mol_type = other RNA
tgtcggaggtagtcggccat

SEQ ID NO: 3368 - RNA, 20 nt, synthetic construct
  source 1..20: mol_type = other RNA
tgtcgggcctcgctggccgt

SEQ ID NO: 3369 - RNA, 20 nt, synthetic construct
  source 1..20: mol_type = other RNA
tgtgcagcactatgtggcct

SEQ ID NO: 3370 - RNA, 20 nt, synthetic construct
  source 1..20: mol_type = other RNA
tgtgccgccttgtcatcaac

SEQ ID NO: 3371 - RNA, 20 nt, synthetic construct
  source 1..20: mol_type = other RNA
tgtggcctcctgcactgctg

SEQ ID NO: 3372 - RNA, 20 nt, synthetic construct
  source 1..20: mol_type = other RNA
tgtggtcagccttgtgcagc

SEQ ID NO: 3373 - RNA, 20 nt, synthetic construct
  source 1..20: mol_type = other RNA
tgttcacgctgtcagtgaaa

SEQ ID NO: 3374 - RNA, 20 nt, synthetic construct
  source 1..20: mol_type = other RNA
tgttgcaggctgcgggcact

SEQ ID NO: 3375 - RNA, 20 nt, synthetic construct
  source 1..20: mol_type = other RNA
tgttgtcgggcctcgctggc

SEQ ID NO: 3376 - RNA, 20 nt, synthetic construct
  source 1..20: mol_type = other RNA
ttacggccagcgaggcccga

SEQ ID NO: 3377 - RNA, 20 nt, synthetic construct
  source 1..20: mol_type = other RNA
ttaggcataggcagggccgg

SEQ ID NO: 3378 - RNA, 20 nt, synthetic construct
  source 1..20: mol_type = other RNA
ttaggtgtacagcagtggct

SEQ ID NO: 3379 - RNA, 20 nt, synthetic construct
  source 1..20: mol_type = other RNA
ttagtacgtgacagcacgca

SEQ ID NO: 3380 - RNA, 20 nt, synthetic construct
  source 1..20: mol_type = other RNA
ttcacgctgtcagtgaaaac

SEQ ID NO: 3381 - RNA, 20 nt, synthetic construct
  source 1..20: mol_type = other RNA
ttcactgacagcgtgaacag

SEQ ID NO: 3382 - RNA, 20 nt, synthetic construct
  source 1..20: mol_type = other RNA
ttccagctctgactgtacgg

SEQ ID NO: 3383 - RNA, 20 nt, synthetic construct
  source 1..20: mol_type = other RNA
ttccattacggccagcgagg

SEQ ID NO: 3384 - RNA, 20 nt, synthetic construct
  source 1..20: mol_type = other RNA
ttccggatgtggtcagcctt

SEQ ID NO: 3385 - RNA, 20 nt, synthetic construct
  source 1..20: mol_type = other RNA
ttccgtctggactccaactg

SEQ ID NO: 3386 - RNA, 20 nt, synthetic construct
  source 1..20: mol_type = other RNA
ttcgggtatcagcagtgcag

SEQ ID NO: 3387 - RNA, 20 nt, synthetic construct
  source 1..20: mol_type = other RNA
ttctgcaggtgttgtcgggc

SEQ ID NO: 3388 - RNA, 20 nt, synthetic construct
  source 1..20: mol_type = other RNA
ttctgcgtacaaagggctgc

SEQ ID NO: 3389 - RNA, 20 nt, synthetic construct
  source 1..20: mol_type = other RNA
ttctggcatcttctgcaggt

SEQ ID NO: 3390 - RNA, 20 nt, synthetic construct
  source 1..20: mol_type = other RNA
ttcttagtacgtgacagcac

SEQ ID NO: 3391 - RNA, 20 nt, synthetic construct
  source 1..20: mol_type = other RNA
ttgagtatgccgactccagc

SEQ ID NO: 3392 - RNA, 20 nt, synthetic construct
  source 1..20: mol_type = other RNA
ttgatgacaaggcggcacag

SEQ ID NO: 3393 - RNA, 20 nt, synthetic construct
  source 1..20: mol_type = other RNA
ttgcaggctgcgggcactgc

SEQ ID NO: 3394 - RNA, 20 nt, synthetic construct
  source 1..20: mol_type = other RNA
ttgccccgtacagtcagagc

SEQ ID NO: 3395 - RNA, 20 nt, synthetic construct
  source 1..20: mol_type = other RNA
ttgcctaggctggtattggg

SEQ ID NO: 3396 - RNA, 20 nt, synthetic construct
  source 1..20: mol_type = other RNA
ttggagtccagacggaagct

SEQ ID NO: 3397 - RNA, 20 nt, synthetic construct
  source 1..20: mol_type = other RNA
ttggccccctctgcacttgc

SEQ ID NO: 3398 - RNA, 20 nt, synthetic construct
  source 1..20: mol_type = other RNA
ttggggttccattacggcca

SEQ ID NO: 3399 - RNA, 20 nt, synthetic construct
  source 1..20: mol_type = other RNA
ttggtggggccacgagtggt

SEQ ID NO: 3400 - RNA, 20 nt, synthetic construct
  source 1..20: mol_type = other RNA
ttgtacgcagaagcagtgcc

SEQ ID NO: 3401 - RNA, 20 nt, synthetic construct
  source 1..20: mol_type = other RNA
ttgtcatcaaccgtctggtg

SEQ ID NO: 3402 - RNA, 20 nt, synthetic construct
  source 1..20: mol_type = other RNA
ttgtccaggccacgcatcct

SEQ ID NO: 3403 - RNA, 20 nt, synthetic construct
  source 1..20: mol_type = other RNA
ttgtcgggcctcgctggccg

SEQ ID NO: 3404 - RNA, 20 nt, synthetic construct
  source 1..20: mol_type = other RNA
ttgtgcagcactatgtggcc

SEQ ID NO: 3405 - RNA, 20 nt, synthetic construct
  source 1..20: mol_type = other RNA
tttaggtgtacagcagtggc

SEQ ID NO: 3406 - RNA, 20 nt, synthetic construct
  source 1..20: mol_type = other RNA
tttcactgacagcgtgaaca

SEQ ID NO: 3407 - RNA, 20 nt, synthetic construct
  source 1..20: mol_type = other RNA
tttccggatgtggtcagcct

SEQ ID NO: 3408 - RNA, 20 nt, synthetic construct
  source 1..20: mol_type = other RNA
tttgtacgcagaagcagtgc

SEQ ID NO: 3409 - RNA, 20 nt, synthetic construct
  source 1..20: mol_type = other RNA
ttttaggtgtacagcagtgg

SEQ ID NO: 3410 - RNA, 20 nt, synthetic construct
  source 1..20: mol_type = other RNA
ttttcactgacagcgtgaac

SEQ ID NO: 3411 - RNA, 21 nt, synthetic construct
  source 1..21: mol_type = other RNA
aaaaccactcgtggccccacc

SEQ ID NO: 3412 - RNA, 21 nt, synthetic construct
  source 1..21: mol_type = other RNA
aaaactggtgcagccctttgt

SEQ ID NO: 3413 - RNA, 21 nt, synthetic construct
  source 1..21: mol_type = other RNA
aaaccactcgtggccccacca

SEQ ID NO: 3414 - RNA, 21 nt, synthetic construct
  source 1..21: mol_type = other RNA
aaactggtgcagccctttgta

SEQ ID NO: 3415 - RNA, 21 nt, synthetic construct
  source 1..21: mol_type = other RNA
aaaggccaggatgcgtggcct

SEQ ID NO: 3416 - RNA, 21 nt, synthetic construct
  source 1..21: mol_type = other RNA
aaagggctgcaccagttttag

SEQ ID NO: 3417 - RNA, 21 nt, synthetic construct
  source 1..21: mol_type = other RNA
aacacctgcagaagatgccag

SEQ ID NO: 3418 - RNA, 21 nt, synthetic construct
  source 1..21: mol_type = other RNA
aacacctgtgccgccttgtca

SEQ ID NO: 3419 - RNA, 21 nt, synthetic construct
  source 1..21: mol_type = other RNA
aacaggtagctggggtgcgtg

SEQ ID NO: 3420 - RNA, 21 nt, synthetic construct
  source 1..21: mol_type = other RNA
aaccactcgtggccccaccaa

SEQ ID NO: 3421 - RNA, 21 nt, synthetic construct
  source 1..21: mol_type = other RNA
aaccccaataccagcctaggc

SEQ ID NO: 3422 - RNA, 21 nt, synthetic construct
  source 1..21: mol_type = other RNA
aaccgtctggtggccgacgtg

SEQ ID NO: 3423 - RNA, 21 nt, synthetic construct
  source 1..21: mol_type = other RNA
aacgtgccttctggcatcttc

SEQ ID NO: 3424 - RNA, 21 nt, synthetic construct
  source 1..21: mol_type = other RNA
aactgcttgtccaggccacgc

SEQ ID NO: 3425 - RNA, 21 nt, synthetic construct
  source 1..21: mol_type = other RNA
aactggtgcagccctttgtac

SEQ ID NO: 3426 - RNA, 21 nt, synthetic construct
  source 1..21: mol_type = other RNA
aagaacgtgccttctggcatc

SEQ ID NO: 3427 - RNA, 21 nt, synthetic construct
  source 1..21: mol_type = other RNA
aagatgccagaaggcacgttc

SEQ ID NO: 3428 - RNA, 21 nt, synthetic construct
  source 1..21: mol_type = other RNA
aagcagtgcccgcagcctgca

SEQ ID NO: 3429 - RNA, 21 nt, synthetic construct
  source 1..21: mol_type = other RNA
aagcagttggagtccagacgg

SEQ ID NO: 3430 - RNA, 21 nt, synthetic construct
  source 1..21: mol_type = other RNA
aagcgacagccccgatcctgc

SEQ ID NO: 3431 - RNA, 21 nt, synthetic construct
  source 1..21: mol_type = other RNA
aagctggagtcggcatactca

SEQ ID NO: 3432 - RNA, 21 nt, synthetic construct
  source 1..21: mol_type = other RNA
aaggaggatgcgcctagtgac

SEQ ID NO: 3433 - RNA, 21 nt, synthetic construct
  source 1..21: mol_type = other RNA
aaggcacgttcttagtacgtg

SEQ ID NO: 3434 - RNA, 21 nt, synthetic construct
  source 1..21: mol_type = other RNA
aaggccaggatgcgtggcctg

SEQ ID NO: 3435 - RNA, 21 nt, synthetic construct
  source 1..21: mol_type = other RNA
aaggcggcacaggtgttgcag

SEQ ID NO: 3436 - RNA, 21 nt, synthetic construct
  source 1..21: mol_type = other RNA
aaggctgaccacatccggaaa

SEQ ID NO: 3437 - RNA, 21 nt, synthetic construct
  source 1..21: mol_type = other RNA
aagggctgcaccagttttagg

SEQ ID NO: 3438 - RNA, 21 nt, synthetic construct
  source 1..21: mol_type = other RNA
aaggggtactgtcggaggtag

SEQ ID NO: 3439 - RNA, 21 nt, synthetic construct
  source 1..21: mol_type = other RNA
aataccagcctaggcaagtgc

SEQ ID NO: 3440 - RNA, 21 nt, synthetic construct
  source 1..21: mol_type = other RNA
aatgcgtacattggtggggcc

SEQ ID NO: 3441 - RNA, 21 nt, synthetic construct
  source 1..21: mol_type = other RNA
aatggaaccccaataccagcc

SEQ ID NO: 3442 - RNA, 21 nt, synthetic construct
  source 1..21: mol_type = other RNA
aatgtacgcattgagtatgcc

SEQ ID NO: 3443 - RNA, 21 nt, synthetic construct
  source 1..21: mol_type = other RNA
acaaagggctgcaccagtttt

SEQ ID NO: 3444 - RNA, 21 nt, synthetic construct
  source 1..21: mol_type = other RNA
acaacacctgcagaagatgcc

SEQ ID NO: 3445 - RNA, 21 nt, synthetic construct
  source 1..21: mol_type = other RNA
acaagcagttggagtccagac

SEQ ID NO: 3446 - RNA, 21 nt, synthetic construct
  source 1..21: mol_type = other RNA
acaaggcggcacaggtgttgc

SEQ ID NO: 3447 - RNA, 21 nt, synthetic construct
  source 1..21: mol_type = other RNA
acaaggctgaccacatccgga

SEQ ID NO: 3448 - RNA, 21 nt, synthetic construct
  source 1..21: mol_type = other RNA
acacctaaaactggtgcagcc

SEQ ID NO: 3449 - RNA, 21 nt, synthetic construct
  source 1..21: mol_type = other RNA
acacctgcagaagatgccaga

SEQ ID NO: 3450 - RNA, 21 nt, synthetic construct
  source 1..21: mol_type = other RNA
acacctgtgccgccttgtcat

SEQ ID NO: 3451 - RNA, 21 nt, synthetic construct
  source 1..21: mol_type = other RNA
acagcacgcaccccagctacc

SEQ ID NO: 3452 - RNA, 21 nt, synthetic construct
  source 1..21: mol_type = other RNA
acagcagtggctggtggagga

SEQ ID NO: 3453 - RNA, 21 nt, synthetic construct
  source 1..21: mol_type = other RNA
acagccccgatcctgctccca

SEQ ID NO: 3454 - RNA, 21 nt, synthetic construct
  source 1..21: mol_type = other RNA
acagcgtgaacaggtagctgg

SEQ ID NO: 3455 - RNA, 21 nt, synthetic construct
  source 1..21: mol_type = other RNA
acaggtagctggggtgcgtgc

SEQ ID NO: 3456 - RNA, 21 nt, synthetic construct
  source 1..21: mol_type = other RNA
acaggtgttgcaggctgcggg

SEQ ID NO: 3457 - RNA, 21 nt, synthetic construct
  source 1..21: mol_type = other RNA
acagtaccccttccagctctg

SEQ ID NO: 3458 - RNA, 21 nt, synthetic construct
  source 1..21: mol_type = other RNA
acagtcagagctggaaggggt

SEQ ID NO: 3459 - RNA, 21 nt, synthetic construct
  source 1..21: mol_type = other RNA
acatagtgctgcacaaggctg

SEQ ID NO: 3460 - RNA, 21 nt, synthetic construct
  source 1..21: mol_type = other RNA
acatccggaaaggccaggatg

SEQ ID NO: 3461 - RNA, 21 nt, synthetic construct
  source 1..21: mol_type = other RNA
acattggtggggccacgagtg

SEQ ID NO: 3462 - RNA, 21 nt, synthetic construct
  source 1..21: mol_type = other RNA
accaatgtacgcattgagtat

SEQ ID NO: 3463 - RNA, 21 nt, synthetic construct
  source 1..21: mol_type = other RNA
accacatccggaaaggccagg

SEQ ID NO: 3464 - RNA, 21 nt, synthetic construct
  source 1..21: mol_type = other RNA
accactcgtggccccaccaat

SEQ ID NO: 3465 - RNA, 21 nt, synthetic construct
  source 1..21: mol_type = other RNA
accagacggttgatgacaagg

SEQ ID NO: 3466 - RNA, 21 nt, synthetic construct
  source 1..21: mol_type = other RNA
accagccactgctgtacacct

SEQ ID NO: 3467 - RNA, 21 nt, synthetic construct
  source 1..21: mol_type = other RNA
accagcctaggcaagtgcaga

SEQ ID NO: 3468 - RNA, 21 nt, synthetic construct
  source 1..21: mol_type = other RNA
accagttttaggtgtacagca

SEQ ID NO: 3469 - RNA, 21 nt, synthetic construct
  source 1..21: mol_type = other RNA
acccagcactgcctgctcctc

SEQ ID NO: 3470 - RNA, 21 nt, synthetic construct
  source 1..21: mol_type = other RNA
accccaataccagcctaggca

SEQ ID NO: 3471 - RNA, 21 nt, synthetic construct
  source 1..21: mol_type = other RNA
accccagctacctgttcacgc

SEQ ID NO: 3472 - RNA, 21 nt, synthetic construct
  source 1..21: mol_type = other RNA
accccggccctgcctatgcct

SEQ ID NO: 3473 - RNA, 21 nt, synthetic construct
  source 1..21: mol_type = other RNA
accccttccagctctgactgt

SEQ ID NO: 3474 - RNA, 21 nt, synthetic construct
  source 1..21: mol_type = other RNA
acccgaagcgacagccccgat

SEQ ID NO: 3475 - RNA, 21 nt, synthetic construct
  source 1..21: mol_type = other RNA
accgtctggtggccgacgtgg

SEQ ID NO: 3476 - RNA, 21 nt, synthetic construct
  source 1..21: mol_type = other RNA
acctaaaactggtgcagccct

SEQ ID NO: 3477 - RNA, 21 nt, synthetic construct
  source 1..21: mol_type = other RNA
acctccgacagtaccccttcc

SEQ ID NO: 3478 - RNA, 21 nt, synthetic construct
  source 1..21: mol_type = other RNA
acctgcagaagatgccagaag

SEQ ID NO: 3479 - RNA, 21 nt, synthetic construct
  source 1..21: mol_type = other RNA
acctgtgccgccttgtcatca

SEQ ID NO: 3480 - RNA, 21 nt, synthetic construct
  source 1..21: mol_type = other RNA
acctgttcacgctgtcagtga

SEQ ID NO: 3481 - RNA, 21 nt, synthetic construct
  source 1..21: mol_type = other RNA
acgagtggttttcactgacag

SEQ ID NO: 3482 - RNA, 21 nt, synthetic construct
  source 1..21: mol_type = other RNA
acgcaccccagctacctgttc

SEQ ID NO: 3483 - RNA, 21 nt, synthetic construct
  source 1..21: mol_type = other RNA
acgcagaagcagtgcccgcag

SEQ ID NO: 3484 - RNA, 21 nt, synthetic construct
  source 1..21: mol_type = other RNA
acgcatcctggcctttccgga

SEQ ID NO: 3485 - RNA, 21 nt, synthetic construct
  source 1..21: mol_type = other RNA
acgcattgagtatgccgactc

SEQ ID NO: 3486 - RNA, 21 nt, synthetic construct
  source 1..21: mol_type = other RNA
acgctgtcagtgaaaaccact

SEQ ID NO: 3487 - RNA, 21 nt, synthetic construct
  source 1..21: mol_type = other RNA
acggaagctggagtcggcata

SEQ ID NO: 3488 - RNA, 21 nt, synthetic construct
  source 1..21: mol_type = other RNA
acggccagcgaggcccgacaa

SEQ ID NO: 3489 - RNA, 21 nt, synthetic construct
  source 1..21: mol_type = other RNA
acggttgatgacaaggcggca

SEQ ID NO: 3490 - RNA, 21 nt, synthetic construct
  source 1..21: mol_type = other RNA
acgtactaagaacgtgccttc

SEQ ID NO: 3491 - RNA, 21 nt, synthetic construct
  source 1..21: mol_type = other RNA
acgtcggccaccagacggttg

SEQ ID NO: 3492 - RNA, 21 nt, synthetic construct
  source 1..21: mol_type = other RNA
acgtgacagcacgcaccccag

SEQ ID NO: 3493 - RNA, 21 nt, synthetic construct
  source 1..21: mol_type = other RNA
acgtgccttctggcatcttct

SEQ ID NO: 3494 - RNA, 21 nt, synthetic construct
  source 1..21: mol_type = other RNA
acgtggactgcctgccactgc

SEQ ID NO: 3495 - RNA, 21 nt, synthetic construct
  source 1..21: mol_type = other RNA
acgttcttagtacgtgacagc

SEQ ID NO: 3496 - RNA, 21 nt, synthetic construct
  source 1..21: mol_type = other RNA
actaagaacgtgccttctggc

SEQ ID NO: 3497 - RNA, 21 nt, synthetic construct
  source 1..21: mol_type = other RNA
actacctccgacagtacccct

SEQ ID NO: 3498 - RNA, 21 nt, synthetic construct
  source 1..21: mol_type = other RNA
actaggcgcatcctccttagg

SEQ ID NO: 3499 - RNA, 21 nt, synthetic construct
  source 1..21: mol_type = other RNA
actatgtggcctcctgcactg

SEQ ID NO: 3500 - RNA, 21 nt, synthetic construct
  source 1..21: mol_type = other RNA
actcaatgcgtacattggtgg

SEQ ID NO: 3501 - RNA, 21 nt, synthetic construct
  source 1..21: mol_type = other RNA
actccaactgcttgtccaggc

SEQ ID NO: 3502 - RNA, 21 nt, synthetic construct
  source 1..21: mol_type = other RNA
actccagcttccgtctggact

SEQ ID NO: 3503 - RNA, 21 nt, synthetic construct
  source 1..21: mol_type = other RNA
actcgtggccccaccaatgta

SEQ ID NO: 3504 - RNA, 21 nt, synthetic construct
  source 1..21: mol_type = other RNA
actgacagcgtgaacaggtag

SEQ ID NO: 3505 - RNA, 21 nt, synthetic construct
  source 1..21: mol_type = other RNA
actgccccggcgcatggccga

SEQ ID NO: 3506 - RNA, 21 nt, synthetic construct
  source 1..21: mol_type = other RNA
actgcctgccactgccccggc

SEQ ID NO: 3507 - RNA, 21 nt, synthetic construct
  source 1..21: mol_type = other RNA
actgcctgctcctccaccagc

SEQ ID NO: 3508 - RNA, 21 nt, synthetic construct
  source 1..21: mol_type = other RNA
actgctgatacccgaagcgac

SEQ ID NO: 3509 - RNA, 21 nt, synthetic construct
  source 1..21: mol_type = other RNA
actgctgtacacctaaaactg

SEQ ID NO: 3510 - RNA, 21 nt, synthetic construct
  source 1..21: mol_type = other RNA
actgcttctgcgtacaaaggg

SEQ ID NO: 3511 - RNA, 21 nt, synthetic construct
  source 1..21: mol_type = other RNA
actgcttgtccaggccacgca

SEQ ID NO: 3512 - RNA, 21 nt, synthetic construct
  source 1..21: mol_type = other RNA
actggtgcagccctttgtacg

SEQ ID NO: 3513 - RNA, 21 nt, synthetic construct
  source 1..21: mol_type = other RNA
actgtacggggcaatctgccc

SEQ ID NO: 3514 - RNA, 21 nt, synthetic construct
  source 1..21: mol_type = other RNA
actgtcggaggtagtcggcca

SEQ ID NO: 3515 - RNA, 21 nt, synthetic construct
  source 1..21: mol_type = other RNA
acttgcctaggctggtattgg

SEQ ID NO: 3516 - RNA, 21 nt, synthetic construct
  source 1..21: mol_type = other RNA
agaacgtgccttctggcatct

SEQ ID NO: 3517 - RNA, 21 nt, synthetic construct
  source 1..21: mol_type = other RNA
agaagatgccagaaggcacgt

SEQ ID NO: 3518 - RNA, 21 nt, synthetic construct
  source 1..21: mol_type = other RNA
agaagcagtgcccgcagcctg

SEQ ID NO: 3519 - RNA, 21 nt, synthetic construct
  source 1..21: mol_type = other RNA
agaaggcacgttcttagtacg

SEQ ID NO: 3520 - RNA, 21 nt, synthetic construct
  source 1..21: mol_type = other RNA
agacggaagctggagtcggca

SEQ ID NO: 3521 - RNA, 21 nt, synthetic construct
  source 1..21: mol_type = other RNA
agacggttgatgacaaggcgg

SEQ ID NO: 3522 - RNA, 21 nt, synthetic construct
  source 1..21: mol_type = other RNA
agagctggaaggggtactgtc

SEQ ID NO: 3523 - RNA, 21 nt, synthetic construct
  source 1..21: mol_type = other RNA
agatgccagaaggcacgttct

SEQ ID NO: 3524 - RNA, 21 nt, synthetic construct
  source 1..21: mol_type = other RNA
agattgccccgtacagtcaga

SEQ ID NO: 3525 - RNA, 21 nt, synthetic construct
  source 1..21: mol_type = other RNA
agcacgcaccccagctacctg

SEQ ID NO: 3526 - RNA, 21 nt, synthetic construct
  source 1..21: mol_type = other RNA
agcactatgtggcctcctgca

SEQ ID NO: 3527 - RNA, 21 nt, synthetic construct
  source 1..21: mol_type = other RNA
agcactgcctgctcctccacc

SEQ ID NO: 3528 - RNA, 21 nt, synthetic construct
  source 1..21: mol_type = other RNA
agcaggatcggggctgtcgct

SEQ ID NO: 3529 - RNA, 21 nt, synthetic construct
  source 1..21: mol_type = other RNA
agcaggcagtgctgggtcact

SEQ ID NO: 3530 - RNA, 21 nt, synthetic construct
  source 1..21: mol_type = other RNA
agcagtgcaggaggccacata

SEQ ID NO: 3531 - RNA, 21 nt, synthetic construct
  source 1..21: mol_type = other RNA
agcagtgcccgcagcctgcaa

SEQ ID NO: 3532 - RNA, 21 nt, synthetic construct
  source 1..21: mol_type = other RNA
agcagtggctggtggaggagc

SEQ ID NO: 3533 - RNA, 21 nt, synthetic construct
  source 1..21: mol_type = other RNA
agcagttggagtccagacgga

SEQ ID NO: 3534 - RNA, 21 nt, synthetic construct
  source 1..21: mol_type = other RNA
agccactgctgtacacctaaa

SEQ ID NO: 3535 - RNA, 21 nt, synthetic construct
  source 1..21: mol_type = other RNA
agccccgatcctgctcccacc

SEQ ID NO: 3536 - RNA, 21 nt, synthetic construct
  source 1..21: mol_type = other RNA
agccctttgtacgcagaagca

SEQ ID NO: 3537 - RNA, 21 nt, synthetic construct
  source 1..21: mol_type = other RNA
agcctaggcaagtgcagaggg

SEQ ID NO: 3538 - RNA, 21 nt, synthetic construct
  source 1..21: mol_type = other RNA
agcctgcaacacctgtgccgc

SEQ ID NO: 3539 - RNA, 21 nt, synthetic construct
  source 1..21: mol_type = other RNA
agccttgtgcagcactatgtg

SEQ ID NO: 3540 - RNA, 21 nt, synthetic construct
  source 1..21: mol_type = other RNA
agcgacagccccgatcctgct

SEQ ID NO: 3541 - RNA, 21 nt, synthetic construct
  source 1..21: mol_type = other RNA
agcgaggcccgacaacacctg

SEQ ID NO: 3542 - RNA, 21 nt, synthetic construct
  source 1..21: mol_type = other RNA
agcgtgaacaggtagctgggg

SEQ ID NO: 3543 - RNA, 21 nt, synthetic construct
  source 1..21: mol_type = other RNA
agctacctgttcacgctgtca

SEQ ID NO: 3544 - RNA, 21 nt, synthetic construct
  source 1..21: mol_type = other RNA
agctctgactgtacggggcaa

SEQ ID NO: 3545 - RNA, 21 nt, synthetic construct
  source 1..21: mol_type = other RNA
agctggaaggggtactgtcgg

SEQ ID NO: 3546 - RNA, 21 nt, synthetic construct
  source 1..21: mol_type = other RNA
agctggagtcggcatactcaa

SEQ ID NO: 3547 - RNA, 21 nt, synthetic construct
  source 1..21: mol_type = other RNA
agctggggtgcgtgctgtcac

SEQ ID NO: 3548 - RNA, 21 nt, synthetic construct
  source 1..21: mol_type = other RNA
agcttccgtctggactccaac

SEQ ID NO: 3549 - RNA, 21 nt, synthetic construct
  source 1..21: mol_type = other RNA
aggagcaggcagtgctgggtc

SEQ ID NO: 3550 - RNA, 21 nt, synthetic construct
  source 1..21: mol_type = other RNA
aggaggatgcgcctagtgacc

SEQ ID NO: 3551 - RNA, 21 nt, synthetic construct
  source 1..21: mol_type = other RNA
aggaggccacatagtgctgca

SEQ ID NO: 3552 - RNA, 21 nt, synthetic construct
  source 1..21: mol_type = other RNA
aggatcggggctgtcgcttcg

SEQ ID NO: 3553 - RNA, 21 nt, synthetic construct
  source 1..21: mol_type = other RNA
aggatgcgcctagtgacccag

SEQ ID NO: 3554 - RNA, 21 nt, synthetic construct
  source 1..21: mol_type = other RNA
aggatgcgtggcctggacaag

SEQ ID NO: 3555 - RNA, 21 nt, synthetic construct
  source 1..21: mol_type = other RNA
aggcaagtgcagagggggcca

SEQ ID NO: 3556 - RNA, 21 nt, synthetic construct
  source 1..21: mol_type = other RNA
aggcacgttcttagtacgtga

SEQ ID NO: 3557 - RNA, 21 nt, synthetic construct
  source 1..21: mol_type = other RNA
aggcagtccacgtcggccacc

SEQ ID NO: 3558 - RNA, 21 nt, synthetic construct
  source 1..21: mol_type = other RNA
aggcagtgctgggtcactagg

SEQ ID NO: 3559 - RNA, 21 nt, synthetic construct
  source 1..21: mol_type = other RNA
aggcataggcagggccggggt

SEQ ID NO: 3560 - RNA, 21 nt, synthetic construct
  source 1..21: mol_type = other RNA
aggccacatagtgctgcacaa

SEQ ID NO: 3561 - RNA, 21 nt, synthetic construct
  source 1..21: mol_type = other RNA
aggccacgcatcctggccttt

SEQ ID NO: 3562 - RNA, 21 nt, synthetic construct
  source 1..21: mol_type = other RNA
aggccaggatgcgtggcctgg

SEQ ID NO: 3563 - RNA, 21 nt, synthetic construct
  source 1..21: mol_type = other RNA
aggcccgacaacacctgcaga

SEQ ID NO: 3564 - RNA, 21 nt, synthetic construct
  source 1..21: mol_type = other RNA
aggcgcatcctccttaggcat

SEQ ID NO: 3565 - RNA, 21 nt, synthetic construct
  source 1..21: mol_type = other RNA
aggcggcacaggtgttgcagg

SEQ ID NO: 3566 - RNA, 21 nt, synthetic construct
  source 1..21: mol_type = other RNA
aggctgaccacatccggaaag

SEQ ID NO: 3567 - RNA, 21 nt, synthetic construct
  source 1..21: mol_type = other RNA
aggctgcgggcactgcttctg

SEQ ID NO: 3568 - RNA, 21 nt, synthetic construct
  source 1..21: mol_type = other RNA
aggctggtattggggttccat

SEQ ID NO: 3569 - RNA, 21 nt, synthetic construct
  source 1..21: mol_type = other RNA
agggccggggtgggagcagga

SEQ ID NO: 3570 - RNA, 21 nt, synthetic construct
  source 1..21: mol_type = other RNA
agggctgcaccagttttaggt

SEQ ID NO: 3571 - RNA, 21 nt, synthetic construct
  source 1..21: mol_type = other RNA
aggggtactgtcggaggtagt

SEQ ID NO: 3572 - RNA, 21 nt, synthetic construct
  source 1..21: mol_type = other RNA
agggtgggcagattgccccgt

SEQ ID NO: 3573 - RNA, 21 nt, synthetic construct
  source 1..21: mol_type = other RNA
aggtagctggggtgcgtgctg

SEQ ID NO: 3574 - RNA, 21 nt, synthetic construct
  source 1..21: mol_type = other RNA
aggtagtcggccatgcgccgg

SEQ ID NO: 3575 - RNA, 21 nt, synthetic construct
  source 1..21: mol_type = other RNA
aggtgtacagcagtggctggt

SEQ ID NO: 3576 - RNA, 21 nt, synthetic construct
  source 1..21: mol_type = other RNA
aggtgttgcaggctgcgggca

SEQ ID NO: 3577 - RNA, 21 nt, synthetic construct
  source 1..21: mol_type = other RNA
aggtgttgtcgggcctcgctg

SEQ ID NO: 3578 - RNA, 21 nt, synthetic construct
  source 1..21: mol_type = other RNA
agtaccccttccagctctgac

SEQ ID NO: 3579 - RNA, 21 nt, synthetic construct
  source 1..21: mol_type = other RNA
agtacgtgacagcacgcaccc

SEQ ID NO: 3580 - RNA, 21 nt, synthetic construct
  source 1..21: mol_type = other RNA
agtatgccgactccagcttcc

SEQ ID NO: 3581 - RNA, 21 nt, synthetic construct
  source 1..21: mol_type = other RNA
agtcagagctggaaggggtac

SEQ ID NO: 3582 - RNA, 21 nt, synthetic construct
  source 1..21: mol_type = other RNA
agtccacgtcggccaccagac

SEQ ID NO: 3583 - RNA, 21 nt, synthetic construct
  source 1..21: mol_type = other RNA
agtccagacggaagctggagt

SEQ ID NO: 3584 - RNA, 21 nt, synthetic construct
  source 1..21: mol_type = other RNA
agtcggcatactcaatgcgta

SEQ ID NO: 3585 - RNA, 21 nt, synthetic construct
  source 1..21: mol_type = other RNA
agtcggccatgcgccggggca

SEQ ID NO: 3586 - RNA, 21 nt, synthetic construct
  source 1..21: mol_type = other RNA
agtgaaaaccactcgtggccc

SEQ ID NO: 3587 - RNA, 21 nt, synthetic construct
  source 1..21: mol_type = other RNA
agtgacccagcactgcctgct

SEQ ID NO: 3588 - RNA, 21 nt, synthetic construct
  source 1..21: mol_type = other RNA
agtgcaggaggccacatagtg

SEQ ID NO: 3589 - RNA, 21 nt, synthetic construct
  source 1..21: mol_type = other RNA
agtgcccgcagcctgcaacac

SEQ ID NO: 3590 - RNA, 21 nt, synthetic construct
  source 1..21: mol_type = other RNA
agtgctgcacaaggctgacca

SEQ ID NO: 3591 - RNA, 21 nt, synthetic construct
  source 1..21: mol_type = other RNA
agtgctgggtcactaggcgca

SEQ ID NO: 3592 - RNA, 21 nt, synthetic construct
  source 1..21: mol_type = other RNA
agtggcaggcagtccacgtcg

SEQ ID NO: 3593 - RNA, 21 nt, synthetic construct
  source 1..21: mol_type = other RNA
agtggctggtggaggagcagg

SEQ ID NO: 3594 - RNA, 21 nt, synthetic construct
  source 1..21: mol_type = other RNA
agtggttttcactgacagcgt

SEQ ID NO: 3595 - RNA, 21 nt, synthetic construct
  source 1..21: mol_type = other RNA
agttggagtccagacggaagc

SEQ ID NO: 3596 - RNA, 21 nt, synthetic construct
  source 1..21: mol_type = other RNA
agttttaggtgtacagcagtg

SEQ ID NO: 3597 - RNA, 21 nt, synthetic construct
  source 1..21: mol_type = other RNA
ataccagcctaggcaagtgca

SEQ ID NO: 3598 - RNA, 21 nt, synthetic construct
  source 1..21: mol_type = other RNA
atacccgaagcgacagccccg

SEQ ID NO: 3599 - RNA, 21 nt, synthetic construct
  source 1..21: mol_type = other RNA
atactcaatgcgtacattggt

SEQ ID NO: 3600 - RNA, 21 nt, synthetic construct
  source 1..21: mol_type = other RNA
ataggcagggccggggtggga

SEQ ID NO: 3601 - RNA, 21 nt, synthetic construct
  source 1..21: mol_type = other RNA
atagtgctgcacaaggctgac

SEQ ID NO: 3602 - RNA, 21 nt, synthetic construct
  source 1..21: mol_type = other RNA
atcaaccgtctggtggccgac

SEQ ID NO: 3603 - RNA, 21 nt, synthetic construct
  source 1..21: mol_type = other RNA
atcagcagtgcaggaggccac

SEQ ID NO: 3604 - RNA, 21 nt, synthetic construct
  source 1..21: mol_type = other RNA
atccggaaaggccaggatgcg

SEQ ID NO: 3605 - RNA, 21 nt, synthetic construct
  source 1..21: mol_type = other RNA
atcctccttaggcataggcag

SEQ ID NO: 3606 - RNA, 21 nt, synthetic construct
  source 1..21: mol_type = other RNA
atcctgctcccaccccggccc

SEQ ID NO: 3607 - RNA, 21 nt, synthetic construct
  source 1..21: mol_type = other RNA
atcctggcctttccggatgtg

SEQ ID NO: 3608 - RNA, 21 nt, synthetic construct
  source 1..21: mol_type = other RNA
atcggggctgtcgcttcgggt

SEQ ID NO: 3609 - RNA, 21 nt, synthetic construct
  source 1..21: mol_type = other RNA
atcttctgcaggtgttgtcgg

SEQ ID NO: 3610 - RNA, 21 nt, synthetic construct
  source 1..21: mol_type = other RNA
atgacaaggcggcacaggtgt

SEQ ID NO: 3611 - RNA, 21 nt, synthetic construct
  source 1..21: mol_type = other RNA
atgccagaaggcacgttctta

SEQ ID NO: 3612 - RNA, 21 nt, synthetic construct
  source 1..21: mol_type = other RNA
atgccgactccagcttccgtc

SEQ ID NO: 3613 - RNA, 21 nt, synthetic construct
  source 1..21: mol_type = other RNA
atgcctaaggaggatgcgcct

SEQ ID NO: 3614 - RNA, 21 nt, synthetic construct
  source 1..21: mol_type = other RNA
atgcgccggggcagtggcagg

SEQ ID NO: 3615 - RNA, 21 nt, synthetic construct
  source 1..21: mol_type = other RNA
atgcgcctagtgacccagcac

SEQ ID NO: 3616 - RNA, 21 nt, synthetic construct
  source 1..21: mol_type = other RNA
atgcgtacattggtggggcca

SEQ ID NO: 3617 - RNA, 21 nt, synthetic construct
  source 1..21: mol_type = other RNA
atgcgtggcctggacaagcag

SEQ ID NO: 3618 - RNA, 21 nt, synthetic construct
  source 1..21: mol_type = other RNA
atggaaccccaataccagcct

SEQ ID NO: 3619 - RNA, 21 nt, synthetic construct
  source 1..21: mol_type = other RNA
atggccgactacctccgacag

SEQ ID NO: 3620 - RNA, 21 nt, synthetic construct
  source 1..21: mol_type = other RNA
atgtacgcattgagtatgccg

SEQ ID NO: 3621 - RNA, 21 nt, synthetic construct
  source 1..21: mol_type = other RNA
atgtcccttggccccctctgc

SEQ ID NO: 3622 - RNA, 21 nt, synthetic construct
  source 1..21: mol_type = other RNA
atgtggcctcctgcactgctg

SEQ ID NO: 3623 - RNA, 21 nt, synthetic construct
  source 1..21: mol_type = other RNA
atgtggtcagccttgtgcagc

SEQ ID NO: 3624 - RNA, 21 nt, synthetic construct
  source 1..21: mol_type = other RNA
attacggccagcgaggcccga

SEQ ID NO: 3625 - RNA, 21 nt, synthetic construct
  source 1..21: mol_type = other RNA
attgagtatgccgactccagc

SEQ ID NO: 3626 - RNA, 21 nt, synthetic construct
  source 1..21: mol_type = other RNA
attgccccgtacagtcagagc

SEQ ID NO: 3627 - RNA, 21 nt, synthetic construct
  source 1..21: mol_type = other RNA
attggggttccattacggcca

SEQ ID NO: 3628 - RNA, 21 nt, synthetic construct
  source 1..21: mol_type = other RNA
attggtggggccacgagtggt

SEQ ID NO: 3629 - RNA, 21 nt, synthetic construct
  source 1..21: mol_type = other RNA
caaagggctgcaccagtttta

SEQ ID NO: 3630 - RNA, 21 nt, synthetic construct
  source 1..21: mol_type = other RNA
caacacctgcagaagatgcca

SEQ ID NO: 3631 - RNA, 21 nt, synthetic construct
  source 1..21: mol_type = other RNA
caacacctgtgccgccttgtc

SEQ ID NO: 3632 - RNA, 21 nt, synthetic construct
  source 1..21: mol_type = other RNA
caaccgtctggtggccgacgt

SEQ ID NO: 3633 - RNA, 21 nt, synthetic construct
  source 1..21: mol_type = other RNA
caactgcttgtccaggccacg

SEQ ID NO: 3634 - RNA, 21 nt, synthetic construct
  source 1..21: mol_type = other RNA
caagcagttggagtccagacg

SEQ ID NO: 3635 - RNA, 21 nt, synthetic construct
  source 1..21: mol_type = other RNA
caaggcggcacaggtgttgca

SEQ ID NO: 3636 - RNA, 21 nt, synthetic construct
  source 1..21: mol_type = other RNA
caaggctgaccacatccggaa

SEQ ID NO: 3637 - RNA, 21 nt, synthetic construct
  source 1..21: mol_type = other RNA
caataccagcctaggcaagtg

SEQ ID NO: 3638 - RNA, 21 nt, synthetic construct
  source 1..21: mol_type = other RNA
caatgcgtacattggtggggc

SEQ ID NO: 3639 - RNA, 21 nt, synthetic construct
  source 1..21: mol_type = other RNA
caatgtacgcattgagtatgc

SEQ ID NO: 3640 - RNA, 21 nt, synthetic construct
  source 1..21: mol_type = other RNA
cacaaggctgaccacatccgg

SEQ ID NO: 3641 - RNA, 21 nt, synthetic construct
  source 1..21: mol_type = other RNA
cacaggtgttgcaggctgcgg

SEQ ID NO: 3642 - RNA, 21 nt, synthetic construct
  source 1..21: mol_type = other RNA
cacatagtgctgcacaaggct

SEQ ID NO: 3643 - RNA, 21 nt, synthetic construct
  source 1..21: mol_type = other RNA
cacatccggaaaggccaggat

SEQ ID NO: 3644 - RNA, 21 nt, synthetic construct
  source 1..21: mol_type = other RNA
caccaatgtacgcattgagta

SEQ ID NO: 3645 - RNA, 21 nt, synthetic construct
  source 1..21: mol_type = other RNA
caccagacggttgatgacaag

SEQ ID NO: 3646 - RNA, 21 nt, synthetic construct
  source 1..21: mol_type = other RNA
caccagccactgctgtacacc

SEQ ID NO: 3647 - RNA, 21 nt, synthetic construct
  source 1..21: mol_type = other RNA
caccagttttaggtgtacagc

SEQ ID NO: 3648 - RNA, 21 nt, synthetic construct
  source 1..21: mol_type = other RNA
caccccagctacctgttcacg

SEQ ID NO: 3649 - RNA, 21 nt, synthetic construct
  source 1..21: mol_type = other RNA
caccccggccctgcctatgcc

SEQ ID NO: 3650 - RNA, 21 nt, synthetic construct
  source 1..21: mol_type = other RNA
cacctaaaactggtgcagccc

SEQ ID NO: 3651 - RNA, 21 nt, synthetic construct
  source 1..21: mol_type = other RNA
cacctgcagaagatgccagaa

SEQ ID NO: 3652 - RNA, 21 nt, synthetic construct
  source 1..21: mol_type = other RNA
cacctgtgccgccttgtcatc

SEQ ID NO: 3653 - RNA, 21 nt, synthetic construct
  source 1..21: mol_type = other RNA
cacgagtggttttcactgaca

SEQ ID NO: 3654 - RNA, 21 nt, synthetic construct
  source 1..21: mol_type = other RNA
cacgcaccccagctacctgtt

SEQ ID NO: 3655 - RNA, 21 nt, synthetic construct
  source 1..21: mol_type = other RNA
cacgcatcctggcctttccgg

SEQ ID NO: 3656 - RNA, 21 nt, synthetic construct
  source 1..21: mol_type = other RNA
cacgctgtcagtgaaaaccac

SEQ ID NO: 3657 - RNA, 21 nt, synthetic construct
  source 1..21: mol_type = other RNA
cacgtactaagaacgtgcctt

SEQ ID NO: 3658 - RNA, 21 nt, synthetic construct
  source 1..21: mol_type = other RNA
cacgtcggccaccagacggtt

SEQ ID NO: 3659 - RNA, 21 nt, synthetic construct
  source 1..21: mol_type = other RNA
cacgttcttagtacgtgacag

SEQ ID NO: 3660 - RNA, 21 nt, synthetic construct
  source 1..21: mol_type = other RNA
cactaggcgcatcctccttag

SEQ ID NO: 3661 - RNA, 21 nt, synthetic construct
  source 1..21: mol_type = other RNA
cactatgtggcctcctgcact

SEQ ID NO: 3662 - RNA, 21 nt, synthetic construct
  source 1..21: mol_type = other RNA
cactcgtggccccaccaatgt

SEQ ID NO: 3663 - RNA, 21 nt, synthetic construct
  source 1..21: mol_type = other RNA
cactgacagcgtgaacaggta

SEQ ID NO: 3664 - RNA, 21 nt, synthetic construct
  source 1..21: mol_type = other RNA
cactgcctgctcctccaccag

SEQ ID NO: 3665 - RNA, 21 nt, synthetic construct
  source 1..21: mol_type = other RNA
cactgctgatacccgaagcga

SEQ ID NO: 3666 - RNA, 21 nt, synthetic construct
  source 1..21: mol_type = other RNA
cactgctgtacacctaaaact

SEQ ID NO: 3667 - RNA, 21 nt, synthetic construct
  source 1..21: mol_type = other RNA
cactgcttctgcgtacaaagg

SEQ ID NO: 3668 - RNA, 21 nt, synthetic construct
  source 1..21: mol_type = other RNA
cacttgcctaggctggtattg

SEQ ID NO: 3669 - RNA, 21 nt, synthetic construct
  source 1..21: mol_type = other RNA
cagaagatgccagaaggcacg

SEQ ID NO: 3670 - RNA, 21 nt, synthetic construct
  source 1..21: mol_type = other RNA
cagaagcagtgcccgcagcct

SEQ ID NO: 3671 - RNA, 21 nt, synthetic construct
  source 1..21: mol_type = other RNA
cagaaggcacgttcttagtac

SEQ ID NO: 3672 - RNA, 21 nt, synthetic construct
  source 1..21: mol_type = other RNA
cagacggaagctggagtcggc

SEQ ID NO: 3673 - RNA, 21 nt, synthetic construct
  source 1..21: mol_type = other RNA
cagacggttgatgacaaggcg

SEQ ID NO: 3674 - RNA, 21 nt, synthetic construct
  source 1..21: mol_type = other RNA
cagagctggaaggggtactgt

SEQ ID NO: 3675 - RNA, 21 nt, synthetic construct
  source 1..21: mol_type = other RNA
cagattgccccgtacagtcag

SEQ ID NO: 3676 - RNA, 21 nt, synthetic construct
  source 1..21: mol_type = other RNA
cagcacgcaccccagctacct

SEQ ID NO: 3677 - RNA, 21 nt, synthetic construct
  source 1..21: mol_type = other RNA
cagcactatgtggcctcctgc

SEQ ID NO: 3678 - RNA, 21 nt, synthetic construct
  source 1..21: mol_type = other RNA
cagcactgcctgctcctccac

SEQ ID NO: 3679 - RNA, 21 nt, synthetic construct
  source 1..21: mol_type = other RNA
cagcagtgcaggaggccacat

SEQ ID NO: 3680 - RNA, 21 nt, synthetic construct
  source 1..21: mol_type = other RNA
cagcagtggctggtggaggag

SEQ ID NO: 3681 - RNA, 21 nt, synthetic construct
  source 1..21: mol_type = other RNA
cagccactgctgtacacctaa

SEQ ID NO: 3682 - RNA, 21 nt, synthetic construct
  source 1..21: mol_type = other RNA
cagccccgatcctgctcccac

SEQ ID NO: 3683 - RNA, 21 nt, synthetic construct
  source 1..21: mol_type = other RNA
cagccctttgtacgcagaagc

SEQ ID NO: 3684 - RNA, 21 nt, synthetic construct
  source 1..21: mol_type = other RNA
cagcctaggcaagtgcagagg

SEQ ID NO: 3685 - RNA, 21 nt, synthetic construct
  source 1..21: mol_type = other RNA
cagcctgcaacacctgtgccg

SEQ ID NO: 3686 - RNA, 21 nt, synthetic construct
  source 1..21: mol_type = other RNA
cagccttgtgcagcactatgt

SEQ ID NO: 3687 - RNA, 21 nt, synthetic construct
  source 1..21: mol_type = other RNA
cagcgaggcccgacaacacct

SEQ ID NO: 3688 - RNA, 21 nt, synthetic construct
  source 1..21: mol_type = other RNA
cagcgtgaacaggtagctggg

SEQ ID NO: 3689 - RNA, 21 nt, synthetic construct
  source 1..21: mol_type = other RNA
cagctacctgttcacgctgtc

SEQ ID NO: 3690 - RNA, 21 nt, synthetic construct
  source 1..21: mol_type = other RNA
cagctctgactgtacggggca

SEQ ID NO: 3691 - RNA, 21 nt, synthetic construct
  source 1..21: mol_type = other RNA
cagcttccgtctggactccaa

SEQ ID NO: 3692 - RNA, 21 nt, synthetic construct
  source 1..21: mol_type = other RNA
caggaggccacatagtgctgc

SEQ ID NO: 3693 - RNA, 21 nt, synthetic construct
  source 1..21: mol_type = other RNA
caggatcggggctgtcgcttc

SEQ ID NO: 3694 - RNA, 21 nt, synthetic construct
  source 1..21: mol_type = other RNA
caggatgcgtggcctggacaa

SEQ ID NO: 3695 - RNA, 21 nt, synthetic construct
  source 1..21: mol_type = other RNA
caggcagtccacgtcggccac

SEQ ID NO: 3696 - RNA, 21 nt, synthetic construct
  source 1..21: mol_type = other RNA
caggcagtgctgggtcactag

SEQ ID NO: 3697 - RNA, 21 nt, synthetic construct
  source 1..21: mol_type = other RNA
caggccacgcatcctggcctt

SEQ ID NO: 3698 - RNA, 21 nt, synthetic construct
  source 1..21: mol_type = other RNA
caggctgcgggcactgcttct

SEQ ID NO: 3699 - RNA, 21 nt, synthetic construct
  source 1..21: mol_type = other RNA
caggtagctggggtgcgtgct

SEQ ID NO: 3700 - RNA, 21 nt, synthetic construct
  source 1..21: mol_type = other RNA
caggtgttgcaggctgcgggc

SEQ ID NO: 3701 - RNA, 21 nt, synthetic construct
  source 1..21: mol_type = other RNA
caggtgttgtcgggcctcgct

SEQ ID NO: 3702 - RNA, 21 nt, synthetic construct
  source 1..21: mol_type = other RNA
cagtaccccttccagctctga

SEQ ID NO: 3703 - RNA, 21 nt, synthetic construct
  source 1..21: mol_type = other RNA
cagtcagagctggaaggggta

SEQ ID NO: 3704 - RNA, 21 nt, synthetic construct
  source 1..21: mol_type = other RNA
cagtccacgtcggccaccaga

SEQ ID NO: 3705 - RNA, 21 nt, synthetic construct
  source 1..21: mol_type = other RNA
cagtgaaaaccactcgtggcc

SEQ ID NO: 3706 - RNA, 21 nt, synthetic construct
  source 1..21: mol_type = other RNA
cagtgcaggaggccacatagt

SEQ ID NO: 3707 - RNA, 21 nt, synthetic construct
  source 1..21: mol_type = other RNA
cagtgcccgcagcctgcaaca

SEQ ID NO: 3708 - RNA, 21 nt, synthetic construct
  source 1..21: mol_type = other RNA
cagtgctgggtcactaggcgc

SEQ ID NO: 3709 - RNA, 21 nt, synthetic construct
  source 1..21: mol_type = other RNA
cagtggcaggcagtccacgtc

SEQ ID NO: 3710 - RNA, 21 nt, synthetic construct
  source 1..21: mol_type = other RNA
cagtggctggtggaggagcag

SEQ ID NO: 3711 - RNA, 21 nt, synthetic construct
  source 1..21: mol_type = other RNA
cagttggagtccagacggaag

SEQ ID NO: 3712 - RNA, 21 nt, synthetic construct
  source 1..21: mol_type = other RNA
cagttttaggtgtacagcagt

SEQ ID NO: 3713 - RNA, 21 nt, synthetic construct
  source 1..21: mol_type = other RNA
catactcaatgcgtacattgg

SEQ ID NO: 3714 - RNA, 21 nt, synthetic construct
  source 1..21: mol_type = other RNA
cataggcagggccggggtggg

SEQ ID NO: 3715 - RNA, 21 nt, synthetic construct
  source 1..21: mol_type = other RNA
catagtgctgcacaaggctga

SEQ ID NO: 3716 - RNA, 21 nt, synthetic construct
  source 1..21: mol_type = other RNA
catcaaccgtctggtggccga

SEQ ID NO: 3717 - RNA, 21 nt, synthetic construct
  source 1..21: mol_type = other RNA
catccggaaaggccaggatgc

SEQ ID NO: 3718 - RNA, 21 nt, synthetic construct
  source 1..21: mol_type = other RNA
catcctccttaggcataggca

SEQ ID NO: 3719 - RNA, 21 nt, synthetic construct
  source 1..21: mol_type = other RNA
catcctggcctttccggatgt

SEQ ID NO: 3720 - RNA, 21 nt, synthetic construct
  source 1..21: mol_type = other RNA
catcttctgcaggtgttgtcg

SEQ ID NO: 3721 - RNA, 21 nt, synthetic construct
  source 1..21: mol_type = other RNA
catgcgccggggcagtggcag

SEQ ID NO: 3722 - RNA, 21 nt, synthetic construct
  source 1..21: mol_type = other RNA
catggccgactacctccgaca

SEQ ID NO: 3723 - RNA, 21 nt, synthetic construct
  source 1..21: mol_type = other RNA
cattacggccagcgaggcccg

SEQ ID NO: 3724 - RNA, 21 nt, synthetic construct
  source 1..21: mol_type = other RNA
cattgagtatgccgactccag

SEQ ID NO: 3725 - RNA, 21 nt, synthetic construct
  source 1..21: mol_type = other RNA
cattggtggggccacgagtgg

SEQ ID NO: 3726 - RNA, 21 nt, synthetic construct
  source 1..21: mol_type = other RNA
ccaactgcttgtccaggccac

SEQ ID NO: 3727 - RNA, 21 nt, synthetic construct
  source 1..21: mol_type = other RNA
ccaataccagcctaggcaagt

SEQ ID NO: 3728 - RNA, 21 nt, synthetic construct
  source 1..21: mol_type = other RNA
ccaatgtacgcattgagtatg

SEQ ID NO: 3729 - RNA, 21 nt, synthetic construct
  source 1..21: mol_type = other RNA
ccacatagtgctgcacaaggc

SEQ ID NO: 3730 - RNA, 21 nt, synthetic construct
  source 1..21: mol_type = other RNA
ccacatccggaaaggccagga

SEQ ID NO: 3731 - RNA, 21 nt, synthetic construct
  source 1..21: mol_type = other RNA
ccaccaatgtacgcattgagt

SEQ ID NO: 3732 - RNA, 21 nt, synthetic construct
  source 1..21: mol_type = other RNA
ccaccagacggttgatgacaa

SEQ ID NO: 3733 - RNA, 21 nt, synthetic construct
  source 1..21: mol_type = other RNA
ccaccagccactgctgtacac

SEQ ID NO: 3734 - RNA, 21 nt, synthetic construct
  source 1..21: mol_type = other RNA
ccaccccggccctgcctatgc

SEQ ID NO: 3735 - RNA, 21 nt, synthetic construct
  source 1..21: mol_type = other RNA
ccacgagtggttttcactgac

SEQ ID NO: 3736 - RNA, 21 nt, synthetic construct
  source 1..21: mol_type = other RNA
ccacgcatcctggcctttccg

SEQ ID NO: 3737 - RNA, 21 nt, synthetic construct
  source 1..21: mol_type = other RNA
ccacgtcggccaccagacggt

SEQ ID NO: 3738 - RNA, 21 nt, synthetic construct
  source 1..21: mol_type = other RNA
ccactcgtggccccaccaatg

SEQ ID NO: 3739 - RNA, 21 nt, synthetic construct
  source 1..21: mol_type = other RNA
ccactgctgtacacctaaaac

SEQ ID NO: 3740 - RNA, 21 nt, synthetic construct
  source 1..21: mol_type = other RNA
ccagaaggcacgttcttagta

SEQ ID NO: 3741 - RNA, 21 nt, synthetic construct
  source 1..21: mol_type = other RNA
ccagacggaagctggagtcgg

SEQ ID NO: 3742 - RNA, 21 nt, synthetic construct
  source 1..21: mol_type = other RNA
ccagacggttgatgacaaggc

SEQ ID NO: 3743 - RNA, 21 nt, synthetic construct
  source 1..21: mol_type = other RNA
ccagcactgcctgctcctcca

SEQ ID NO: 3744 - RNA, 21 nt, synthetic construct
  source 1..21: mol_type = other RNA
ccagccactgctgtacaccta

SEQ ID NO: 3745 - RNA, 21 nt, synthetic construct
  source 1..21: mol_type = other RNA
ccagcctaggcaagtgcagag

SEQ ID NO: 3746 - RNA, 21 nt, synthetic construct
  source 1..21: mol_type = other RNA
ccagcgaggcccgacaacacc

SEQ ID NO: 3747 - RNA, 21 nt, synthetic construct
  source 1..21: mol_type = other RNA
ccagctacctgttcacgctgt

SEQ ID NO: 3748 - RNA, 21 nt, synthetic construct
  source 1..21: mol_type = other RNA
ccagctctgactgtacggggc

SEQ ID NO: 3749 - RNA, 21 nt, synthetic construct
  source 1..21: mol_type = other RNA
ccagcttccgtctggactcca

SEQ ID NO: 3750 - RNA, 21 nt, synthetic construct
  source 1..21: mol_type = other RNA
ccaggatgcgtggcctggaca

SEQ ID NO: 3751 - RNA, 21 nt, synthetic construct
  source 1..21: mol_type = other RNA
ccaggccacgcatcctggcct

SEQ ID NO: 3752 - RNA, 21 nt, synthetic construct
  source 1..21: mol_type = other RNA
ccagttttaggtgtacagcag

SEQ ID NO: 3753 - RNA, 21 nt, synthetic construct
  source 1..21: mol_type = other RNA
ccatgcgccggggcagtggca

SEQ ID NO: 3754 - RNA, 21 nt, synthetic construct
  source 1..21: mol_type = other RNA
ccattacggccagcgaggccc

SEQ ID NO: 3755 - RNA, 21 nt, synthetic construct
  source 1..21: mol_type = other RNA
cccaataccagcctaggcaag

SEQ ID NO: 3756 - RNA, 21 nt, synthetic construct
  source 1..21: mol_type = other RNA
cccaccaatgtacgcattgag

SEQ ID NO: 3757 - RNA, 21 nt, synthetic construct
  source 1..21: mol_type = other RNA
cccaccccggccctgcctatg

SEQ ID NO: 3758 - RNA, 21 nt, synthetic construct
  source 1..21: mol_type = other RNA
cccagcactgcctgctcctcc

SEQ ID NO: 3759 - RNA, 21 nt, synthetic construct
  source 1..21: mol_type = other RNA
cccagctacctgttcacgctg

SEQ ID NO: 3760 - RNA, 21 nt, synthetic construct
  source 1..21: mol_type = other RNA
ccccaataccagcctaggcaa

SEQ ID NO: 3761 - RNA, 21 nt, synthetic construct
  source 1..21: mol_type = other RNA
ccccaccaatgtacgcattga

SEQ ID NO: 3762 - RNA, 21 nt, synthetic construct
  source 1..21: mol_type = other RNA
ccccagctacctgttcacgct

SEQ ID NO: 3763 - RNA, 21 nt, synthetic construct
  source 1..21: mol_type = other RNA
ccccctctgcacttgcctagg

SEQ ID NO: 3764 - RNA, 21 nt, synthetic construct
  source 1..21: mol_type = other RNA
ccccgatcctgctcccacccc

SEQ ID NO: 3765 - RNA, 21 nt, synthetic construct
  source 1..21: mol_type = other RNA
ccccggccctgcctatgccta

SEQ ID NO: 3766 - RNA, 21 nt, synthetic construct
  source 1..21: mol_type = other RNA
ccccggcgcatggccgactac

SEQ ID NO: 3767 - RNA, 21 nt, synthetic construct
  source 1..21: mol_type = other RNA
ccccgtacagtcagagctgga

SEQ ID NO: 3768 - RNA, 21 nt, synthetic construct
  source 1..21: mol_type = other RNA
cccctctgcacttgcctaggc

SEQ ID NO: 3769 - RNA, 21 nt, synthetic construct
  source 1..21: mol_type = other RNA
ccccttccagctctgactgta

SEQ ID NO: 3770 - RNA, 21 nt, synthetic construct
  source 1..21: mol_type = other RNA
cccgaagcgacagccccgatc

SEQ ID NO: 3771 - RNA, 21 nt, synthetic construct
  source 1..21: mol_type = other RNA
cccgacaacacctgcagaaga

SEQ ID NO: 3772 - RNA, 21 nt, synthetic construct
  source 1..21: mol_type = other RNA
cccgatcctgctcccaccccg

SEQ ID NO: 3773 - RNA, 21 nt, synthetic construct
  source 1..21: mol_type = other RNA
cccgcagcctgcaacacctgt

SEQ ID NO: 3774 - RNA, 21 nt, synthetic construct
  source 1..21: mol_type = other RNA
cccggccctgcctatgcctaa

SEQ ID NO: 3775 - RNA, 21 nt, synthetic construct
  source 1..21: mol_type = other RNA
cccggcgcatggccgactacc

SEQ ID NO: 3776 - RNA, 21 nt, synthetic construct
  source 1..21: mol_type = other RNA
cccgtacagtcagagctggaa

SEQ ID NO: 3777 - RNA, 21 nt, synthetic construct
  source 1..21: mol_type = other RNA
ccctctgcacttgcctaggct

SEQ ID NO: 3778 - RNA, 21 nt, synthetic construct
  source 1..21: mol_type = other RNA
ccctgcctatgcctaaggagg

SEQ ID NO: 3779 - RNA, 21 nt, synthetic construct
  source 1..21: mol_type = other RNA
cccttccagctctgactgtac

SEQ ID NO: 3780 - RNA, 21 nt, synthetic construct
  source 1..21: mol_type = other RNA
cccttggccccctctgcactt

SEQ ID NO: 3781 - RNA, 21 nt, synthetic construct
  source 1..21: mol_type = other RNA
ccctttgtacgcagaagcagt

SEQ ID NO: 3782 - RNA, 21 nt, synthetic construct
  source 1..21: mol_type = other RNA
ccgaagcgacagccccgatcc

SEQ ID NO: 3783 - RNA, 21 nt, synthetic construct
  source 1..21: mol_type = other RNA
ccgacaacacctgcagaagat

SEQ ID NO: 3784 - RNA, 21 nt, synthetic construct
  source 1..21: mol_type = other RNA
ccgacagtaccccttccagct

SEQ ID NO: 3785 - RNA, 21 nt, synthetic construct
  source 1..21: mol_type = other RNA
ccgacgtggactgcctgccac

SEQ ID NO: 3786 - RNA, 21 nt, synthetic construct
  source 1..21: mol_type = other RNA
ccgactacctccgacagtacc

SEQ ID NO: 3787 - RNA, 21 nt, synthetic construct
  source 1..21: mol_type = other RNA
ccgactccagcttccgtctgg

SEQ ID NO: 3788 - RNA, 21 nt, synthetic construct
  source 1..21: mol_type = other RNA
ccgatcctgctcccaccccgg

SEQ ID NO: 3789 - RNA, 21 nt, synthetic construct
  source 1..21: mol_type = other RNA
ccgcagcctgcaacacctgtg

SEQ ID NO: 3790 - RNA, 21 nt, synthetic construct
  source 1..21: mol_type = other RNA
ccgccttgtcatcaaccgtct

SEQ ID NO: 3791 - RNA, 21 nt, synthetic construct
  source 1..21: mol_type = other RNA
ccggaaaggccaggatgcgtg

SEQ ID NO: 3792 - RNA, 21 nt, synthetic construct
  source 1..21: mol_type = other RNA
ccggatgtggtcagccttgtg

SEQ ID NO: 3793 - RNA, 21 nt, synthetic construct
  source 1..21: mol_type = other RNA
ccggccctgcctatgcctaag

SEQ ID NO: 3794 - RNA, 21 nt, synthetic construct
  source 1..21: mol_type = other RNA
ccggcgcatggccgactacct

SEQ ID NO: 3795 - RNA, 21 nt, synthetic construct
  source 1..21: mol_type = other RNA
ccggggcagtggcaggcagtc

SEQ ID NO: 3796 - RNA, 21 nt, synthetic construct
  source 1..21: mol_type = other RNA
ccggggtgggagcaggatcgg

SEQ ID NO: 3797 - RNA, 21 nt, synthetic construct
  source 1..21: mol_type = other RNA
ccgtaatggaaccccaatacc

SEQ ID NO: 3798 - RNA, 21 nt, synthetic construct
  source 1..21: mol_type = other RNA
ccgtacagtcagagctggaag

SEQ ID NO: 3799 - RNA, 21 nt, synthetic construct
  source 1..21: mol_type = other RNA
ccgtctggactccaactgctt

SEQ ID NO: 3800 - RNA, 21 nt, synthetic construct
  source 1..21: mol_type = other RNA
ccgtctggtggccgacgtgga

SEQ ID NO: 3801 - RNA, 21 nt, synthetic construct
  source 1..21: mol_type = other RNA
cctaaaactggtgcagccctt

SEQ ID NO: 3802 - RNA, 21 nt, synthetic construct
  source 1..21: mol_type = other RNA
cctaaggaggatgcgcctagt

SEQ ID NO: 3803 - RNA, 21 nt, synthetic construct
  source 1..21: mol_type = other RNA
cctaggcaagtgcagaggggg

SEQ ID NO: 3804 - RNA, 21 nt, synthetic construct
  source 1..21: mol_type = other RNA
cctaggctggtattggggttc

SEQ ID NO: 3805 - RNA, 21 nt, synthetic construct
  source 1..21: mol_type = other RNA
cctagtgacccagcactgcct

SEQ ID NO: 3806 - RNA, 21 nt, synthetic construct
  source 1..21: mol_type = other RNA
cctatgcctaaggaggatgcg

SEQ ID NO: 3807 - RNA, 21 nt, synthetic construct
  source 1..21: mol_type = other RNA
cctccaccagccactgctgta

SEQ ID NO: 3808 - RNA, 21 nt, synthetic construct
  source 1..21: mol_type = other RNA
cctccgacagtaccccttcca

SEQ ID NO: 3809 - RNA, 21 nt, synthetic construct
  source 1..21: mol_type = other RNA
cctcctgcactgctgataccc

SEQ ID NO: 3810 - RNA, 21 nt, synthetic construct
  source 1..21: mol_type = other RNA
cctccttaggcataggcaggg

SEQ ID NO: 3811 - RNA, 21 nt, synthetic construct
  source 1..21: mol_type = other RNA
cctcgctggccgtaatggaac

SEQ ID NO: 3812 - RNA, 21 nt, synthetic construct
  source 1..21: mol_type = other RNA
cctctgcacttgcctaggctg

SEQ ID NO: 3813 - RNA, 21 nt, synthetic construct
  source 1..21: mol_type = other RNA
cctgcaacacctgtgccgcct

SEQ ID NO: 3814 - RNA, 21 nt, synthetic construct
  source 1..21: mol_type = other RNA
cctgcactgctgatacccgaa

SEQ ID NO: 3815 - RNA, 21 nt, synthetic construct
  source 1..21: mol_type = other RNA
cctgcagaagatgccagaagg

SEQ ID NO: 3816 - RNA, 21 nt, synthetic construct
  source 1..21: mol_type = other RNA
cctgccactgccccggcgcat

SEQ ID NO: 3817 - RNA, 21 nt, synthetic construct
  source 1..21: mol_type = other RNA
cctgcctatgcctaaggagga

SEQ ID NO: 3818 - RNA, 21 nt, synthetic construct
  source 1..21: mol_type = other RNA
cctgctcctccaccagccact

SEQ ID NO: 3819 - RNA, 21 nt, synthetic construct
  source 1..21: mol_type = other RNA
cctggacaagcagttggagtc

SEQ ID NO: 3820 - RNA, 21 nt, synthetic construct
  source 1..21: mol_type = other RNA
cctggcctttccggatgtggt

SEQ ID NO: 3821 - RNA, 21 nt, synthetic construct
  source 1..21: mol_type = other RNA
cctgtgccgccttgtcatcaa

SEQ ID NO: 3822 - RNA, 21 nt, synthetic construct
  source 1..21: mol_type = other RNA
cctgttcacgctgtcagtgaa

SEQ ID NO: 3823 - RNA, 21 nt, synthetic construct
  source 1..21: mol_type = other RNA
ccttaggcataggcagggccg

SEQ ID NO: 3824 - RNA, 21 nt, synthetic construct
  source 1..21: mol_type = other RNA
ccttccagctctgactgtacg

SEQ ID NO: 3825 - RNA, 21 nt, synthetic construct
  source 1..21: mol_type = other RNA
ccttctggcatcttctgcagg

SEQ ID NO: 3826 - RNA, 21 nt, synthetic construct
  source 1..21: mol_type = other RNA
ccttggccccctctgcacttg

SEQ ID NO: 3827 - RNA, 21 nt, synthetic construct
  source 1..21: mol_type = other RNA
ccttgtcatcaaccgtctggt

SEQ ID NO: 3828 - RNA, 21 nt, synthetic construct
  source 1..21: mol_type = other RNA
ccttgtgcagcactatgtggc

SEQ ID NO: 3829 - RNA, 21 nt, synthetic construct
  source 1..21: mol_type = other RNA
cctttccggatgtggtcagcc

SEQ ID NO: 3830 - RNA, 21 nt, synthetic construct
  source 1..21: mol_type = other RNA
cctttgtacgcagaagcagtg

SEQ ID NO: 3831 - RNA, 21 nt, synthetic construct
  source 1..21: mol_type = other RNA
cgaagcgacagccccgatcct

SEQ ID NO: 3832 - RNA, 21 nt, synthetic construct
  source 1..21: mol_type = other RNA
cgacaacacctgcagaagatg

SEQ ID NO: 3833 - RNA, 21 nt, synthetic construct
  source 1..21: mol_type = other RNA
cgacagccccgatcctgctcc

SEQ ID NO: 3834 - RNA, 21 nt, synthetic construct
  source 1..21: mol_type = other RNA
cgacagtaccccttccagctc

SEQ ID NO: 3835 - RNA, 21 nt, synthetic construct
  source 1..21: mol_type = other RNA
cgacgtggactgcctgccact

SEQ ID NO: 3836 - RNA, 21 nt, synthetic construct
  source 1..21: mol_type = other RNA
cgactacctccgacagtaccc

SEQ ID NO: 3837 - RNA, 21 nt, synthetic construct
  source 1..21: mol_type = other RNA
cgactccagcttccgtctgga

SEQ ID NO: 3838 - RNA, 21 nt, synthetic construct
  source 1..21: mol_type = other RNA
cgaggcccgacaacacctgca

SEQ ID NO: 3839 - RNA, 21 nt, synthetic construct
  source 1..21: mol_type = other RNA
cgagtggttttcactgacagc

SEQ ID NO: 3840 - RNA, 21 nt, synthetic construct
  source 1..21: mol_type = other RNA
cgatcctgctcccaccccggc

SEQ ID NO: 3841 - RNA, 21 nt, synthetic construct
  source 1..21: mol_type = other RNA
cgcaccccagctacctgttca

SEQ ID NO: 3842 - RNA, 21 nt, synthetic construct
  source 1..21: mol_type = other RNA
cgcagaagcagtgcccgcagc

SEQ ID NO: 3843 - RNA, 21 nt, synthetic construct
  source 1..21: mol_type = other RNA
cgcagcctgcaacacctgtgc

SEQ ID NO: 3844 - RNA, 21 nt, synthetic construct
  source 1..21: mol_type = other RNA
cgcatcctccttaggcatagg

SEQ ID NO: 3845 - RNA, 21 nt, synthetic construct
  source 1..21: mol_type = other RNA
cgcatcctggcctttccggat

SEQ ID NO: 3846 - RNA, 21 nt, synthetic construct
  source 1..21: mol_type = other RNA
cgcatggccgactacctccga

SEQ ID NO: 3847 - RNA, 21 nt, synthetic construct
  source 1..21: mol_type = other RNA
cgcattgagtatgccgactcc

SEQ ID NO: 3848 - RNA, 21 nt, synthetic construct
  source 1..21: mol_type = other RNA
cgcctagtgacccagcactgc

SEQ ID NO: 3849 - RNA, 21 nt, synthetic construct
  source 1..21: mol_type = other RNA
cgccttgtcatcaaccgtctg

SEQ ID NO: 3850 - RNA, 21 nt, synthetic construct
  source 1..21: mol_type = other RNA
cgctggccgtaatggaacccc

SEQ ID NO: 3851 - RNA, 21 nt, synthetic construct
  source 1..21: mol_type = other RNA
cgctgtcagtgaaaaccactc

SEQ ID NO: 3852 - RNA, 21 nt, synthetic construct
  source 1..21: mol_type = other RNA
cgcttcgggtatcagcagtgc

SEQ ID NO: 3853 - RNA, 21 nt, synthetic construct
  source 1..21: mol_type = other RNA
cggaaaggccaggatgcgtgg

SEQ ID NO: 3854 - RNA, 21 nt, synthetic construct
  source 1..21: mol_type = other RNA
cggaagctggagtcggcatac

SEQ ID NO: 3855 - RNA, 21 nt, synthetic construct
  source 1..21: mol_type = other RNA
cggaggtagtcggccatgcgc

SEQ ID NO: 3856 - RNA, 21 nt, synthetic construct
  source 1..21: mol_type = other RNA
cggatgtggtcagccttgtgc

SEQ ID NO: 3857 - RNA, 21 nt, synthetic construct
  source 1..21: mol_type = other RNA
cggcacaggtgttgcaggctg

SEQ ID NO: 3858 - RNA, 21 nt, synthetic construct
  source 1..21: mol_type = other RNA
cggcatactcaatgcgtacat

SEQ ID NO: 3859 - RNA, 21 nt, synthetic construct
  source 1..21: mol_type = other RNA
cggccaccagacggttgatga

SEQ ID NO: 3860 - RNA, 21 nt, synthetic construct
  source 1..21: mol_type = other RNA
cggccagcgaggcccgacaac

SEQ ID NO: 3861 - RNA, 21 nt, synthetic construct
  source 1..21: mol_type = other RNA
cggccctgcctatgcctaagg

SEQ ID NO: 3862 - RNA, 21 nt, synthetic construct
  source 1..21: mol_type = other RNA
cggcgcatggccgactacctc

SEQ ID NO: 3863 - RNA, 21 nt, synthetic construct
  source 1..21: mol_type = other RNA
cgggcactgcttctgcgtaca

SEQ ID NO: 3864 - RNA, 21 nt, synthetic construct
  source 1..21: mol_type = other RNA
cgggcctcgctggccgtaatg

SEQ ID NO: 3865 - RNA, 21 nt, synthetic construct
  source 1..21: mol_type = other RNA
cggggcagtggcaggcagtcc

SEQ ID NO: 3866 - RNA, 21 nt, synthetic construct
  source 1..21: mol_type = other RNA
cggggctgtcgcttcgggtat

SEQ ID NO: 3867 - RNA, 21 nt, synthetic construct
  source 1..21: mol_type = other RNA
cggggtgggagcaggatcggg

SEQ ID NO: 3868 - RNA, 21 nt, synthetic construct
  source 1..21: mol_type = other RNA
cgggtatcagcagtgcaggag

SEQ ID NO: 3869 - RNA, 21 nt, synthetic construct
  source 1..21: mol_type = other RNA
cggttgatgacaaggcggcac

SEQ ID NO: 3870 - RNA, 21 nt, synthetic construct
  source 1..21: mol_type = other RNA
cgtaatggaaccccaatacca

SEQ ID NO: 3871 - RNA, 21 nt, synthetic construct
  source 1..21: mol_type = other RNA
cgtacaaagggctgcaccagt

SEQ ID NO: 3872 - RNA, 21 nt, synthetic construct
  source 1..21: mol_type = other RNA
cgtacagtcagagctggaagg

SEQ ID NO: 3873 - RNA, 21 nt, synthetic construct
  source 1..21: mol_type = other RNA
cgtacattggtggggccacga

SEQ ID NO: 3874 - RNA, 21 nt, synthetic construct
  source 1..21: mol_type = other RNA
cgtactaagaacgtgccttct

SEQ ID NO: 3875 - RNA, 21 nt, synthetic construct
  source 1..21: mol_type = other RNA
cgtcggccaccagacggttga

SEQ ID NO: 3876 - RNA, 21 nt, synthetic construct
  source 1..21: mol_type = other RNA
cgtctggactccaactgcttg

SEQ ID NO: 3877 - RNA, 21 nt, synthetic construct
  source 1..21: mol_type = other RNA
cgtctggtggccgacgtggac

SEQ ID NO: 3878 - RNA, 21 nt, synthetic construct
  source 1..21: mol_type = other RNA
cgtgaacaggtagctggggtg

SEQ ID NO: 3879 - RNA, 21 nt, synthetic construct
  source 1..21: mol_type = other RNA
cgtgacagcacgcaccccagc

SEQ ID NO: 3880 - RNA, 21 nt, synthetic construct
  source 1..21: mol_type = other RNA
cgtgccttctggcatcttctg

SEQ ID NO: 3881 - RNA, 21 nt, synthetic construct
  source 1..21: mol_type = other RNA
cgtgctgtcacgtactaagaa

SEQ ID NO: 3882 - RNA, 21 nt, synthetic construct
  source 1..21: mol_type = other RNA
cgtggactgcctgccactgcc

SEQ ID NO: 3883 - RNA, 21 nt, synthetic construct
  source 1..21: mol_type = other RNA
cgtggccccaccaatgtacgc

SEQ ID NO: 3884 - RNA, 21 nt, synthetic construct
  source 1..21: mol_type = other RNA
cgtggcctggacaagcagttg

SEQ ID NO: 3885 - RNA, 21 nt, synthetic construct
  source 1..21: mol_type = other RNA
cgttcttagtacgtgacagca

SEQ ID NO: 3886 - RNA, 21 nt, synthetic construct
  source 1..21: mol_type = other RNA
ctaaaactggtgcagcccttt

SEQ ID NO: 3887 - RNA, 21 nt, synthetic construct
  source 1..21: mol_type = other RNA
ctaagaacgtgccttctggca

SEQ ID NO: 3888 - RNA, 21 nt, synthetic construct
  source 1..21: mol_type = other RNA
ctaaggaggatgcgcctagtg

SEQ ID NO: 3889 - RNA, 21 nt, synthetic construct
  source 1..21: mol_type = other RNA
ctacctccgacagtacccctt

SEQ ID NO: 3890 - RNA, 21 nt, synthetic construct
  source 1..21: mol_type = other RNA
ctacctgttcacgctgtcagt

SEQ ID NO: 3891 - RNA, 21 nt, synthetic construct
  source 1..21: mol_type = other RNA
ctaggcaagtgcagagggggc

SEQ ID NO: 3892 - RNA, 21 nt, synthetic construct
  source 1..21: mol_type = other RNA
ctaggcgcatcctccttaggc

SEQ ID NO: 3893 - RNA, 21 nt, synthetic construct
  source 1..21: mol_type = other RNA
ctaggctggtattggggttcc

SEQ ID NO: 3894 - RNA, 21 nt, synthetic construct
  source 1..21: mol_type = other RNA
ctagtgacccagcactgcctg

SEQ ID NO: 3895 - RNA, 21 nt, synthetic construct
  source 1..21: mol_type = other RNA
ctatgcctaaggaggatgcgc

SEQ ID NO: 3896 - RNA, 21 nt, synthetic construct
  source 1..21: mol_type = other RNA
ctatgtggcctcctgcactgc

SEQ ID NO: 3897 - RNA, 21 nt, synthetic construct
  source 1..21: mol_type = other RNA
ctcaatgcgtacattggtggg

SEQ ID NO: 3898 - RNA, 21 nt, synthetic construct
  source 1..21: mol_type = other RNA
ctccaactgcttgtccaggcc

SEQ ID NO: 3899 - RNA, 21 nt, synthetic construct
  source 1..21: mol_type = other RNA
ctccaccagccactgctgtac

SEQ ID NO: 3900 - RNA, 21 nt, synthetic construct
  source 1..21: mol_type = other RNA
ctccagcttccgtctggactc

SEQ ID NO: 3901 - RNA, 21 nt, synthetic construct
  source 1..21: mol_type = other RNA
ctcccaccccggccctgccta

SEQ ID NO: 3902 - RNA, 21 nt, synthetic construct
  source 1..21: mol_type = other RNA
ctccgacagtaccccttccag

SEQ ID NO: 3903 - RNA, 21 nt, synthetic construct
  source 1..21: mol_type = other RNA
ctcctccaccagccactgctg

SEQ ID NO: 3904 - RNA, 21 nt, synthetic construct
  source 1..21: mol_type = other RNA
ctcctgcactgctgatacccg

SEQ ID NO: 3905 - RNA, 21 nt, synthetic construct
  source 1..21: mol_type = other RNA
ctccttaggcataggcagggc

SEQ ID NO: 3906 - RNA, 21 nt, synthetic construct
  source 1..21: mol_type = other RNA
ctcgctggccgtaatggaacc

SEQ ID NO: 3907 - RNA, 21 nt, synthetic construct
  source 1..21: mol_type = other RNA
ctcgtggccccaccaatgtac

SEQ ID NO: 3908 - RNA, 21 nt, synthetic construct
  source 1..21: mol_type = other RNA
ctctgactgtacggggcaatc

SEQ ID NO: 3909 - RNA, 21 nt, synthetic construct
  source 1..21: mol_type = other RNA
ctctgcacttgcctaggctgg

SEQ ID NO: 3910 - RNA, 21 nt, synthetic construct
  source 1..21: mol_type = other RNA
ctgacagcgtgaacaggtagc

SEQ ID NO: 3911 - RNA, 21 nt, synthetic construct
  source 1..21: mol_type = other RNA
ctgaccacatccggaaaggcc

SEQ ID NO: 3912 - RNA, 21 nt, synthetic construct
  source 1..21: mol_type = other RNA
ctgactgtacggggcaatctg

SEQ ID NO: 3913 - RNA, 21 nt, synthetic construct
  source 1..21: mol_type = other RNA
ctgatacccgaagcgacagcc

SEQ ID NO: 3914 - RNA, 21 nt, synthetic construct
  source 1..21: mol_type = other RNA
ctgcaacacctgtgccgcctt

SEQ ID NO: 3915 - RNA, 21 nt, synthetic construct
  source 1..21: mol_type = other RNA
ctgcacaaggctgaccacatc

SEQ ID NO: 3916 - RNA, 21 nt, synthetic construct
  source 1..21: mol_type = other RNA
ctgcaccagttttaggtgtac

SEQ ID NO: 3917 - RNA, 21 nt, synthetic construct
  source 1..21: mol_type = other RNA
ctgcactgctgatacccgaag

SEQ ID NO: 3918 - RNA, 21 nt, synthetic construct
  source 1..21: mol_type = other RNA
ctgcacttgcctaggctggta

SEQ ID NO: 3919 - RNA, 21 nt, synthetic construct
  source 1..21: mol_type = other RNA
ctgcagaagatgccagaaggc

SEQ ID NO: 3920 - RNA, 21 nt, synthetic construct
  source 1..21: mol_type = other RNA
ctgcaggtgttgtcgggcctc

SEQ ID NO: 3921 - RNA, 21 nt, synthetic construct
  source 1..21: mol_type = other RNA
ctgccactgccccggcgcatg

SEQ ID NO: 3922 - RNA, 21 nt, synthetic construct
  source 1..21: mol_type = other RNA
ctgcctatgcctaaggaggat

SEQ ID NO: 3923 - RNA, 21 nt, synthetic construct
  source 1..21: mol_type = other RNA
ctgcctgctcctccaccagcc

SEQ ID NO: 3924 - RNA, 21 nt, synthetic construct
  source 1..21: mol_type = other RNA
ctgcgggcactgcttctgcgt

SEQ ID NO: 3925 - RNA, 21 nt, synthetic construct
  source 1..21: mol_type = other RNA
ctgcgtacaaagggctgcacc

SEQ ID NO: 3926 - RNA, 21 nt, synthetic construct
  source 1..21: mol_type = other RNA
ctgctcctccaccagccactg

SEQ ID NO: 3927 - RNA, 21 nt, synthetic construct
  source 1..21: mol_type = other RNA
ctgctgatacccgaagcgaca

SEQ ID NO: 3928 - RNA, 21 nt, synthetic construct
  source 1..21: mol_type = other RNA
ctgctgtacacctaaaactgg

SEQ ID NO: 3929 - RNA, 21 nt, synthetic construct
  source 1..21: mol_type = other RNA
ctgcttctgcgtacaaagggc

SEQ ID NO: 3930 - RNA, 21 nt, synthetic construct
  source 1..21: mol_type = other RNA
ctgcttgtccaggccacgcat

SEQ ID NO: 3931 - RNA, 21 nt, synthetic construct
  source 1..21: mol_type = other RNA
ctggaaggggtactgtcggag

SEQ ID NO: 3932 - RNA, 21 nt, synthetic construct
  source 1..21: mol_type = other RNA
ctggacaagcagttggagtcc

SEQ ID NO: 3933 - RNA, 21 nt, synthetic construct
  source 1..21: mol_type = other RNA
ctggactccaactgcttgtcc

SEQ ID NO: 3934 - RNA, 21 nt, synthetic construct
  source 1..21: mol_type = other RNA
ctggagtcggcatactcaatg

SEQ ID NO: 3935 - RNA, 21 nt, synthetic construct
  source 1..21: mol_type = other RNA
ctggcatcttctgcaggtgtt

SEQ ID NO: 3936 - RNA, 21 nt, synthetic construct
  source 1..21: mol_type = other RNA
ctggccgtaatggaaccccaa

SEQ ID NO: 3937 - RNA, 21 nt, synthetic construct
  source 1..21: mol_type = other RNA
ctggcctttccggatgtggtc

SEQ ID NO: 3938 - RNA, 21 nt, synthetic construct
  source 1..21: mol_type = other RNA
ctggggtgcgtgctgtcacgt

SEQ ID NO: 3939 - RNA, 21 nt, synthetic construct
  source 1..21: mol_type = other RNA
ctgggtcactaggcgcatcct

SEQ ID NO: 3940 - RNA, 21 nt, synthetic construct
  source 1..21: mol_type = other RNA
ctgggtgagggtgggcagatt

SEQ ID NO: 3941 - RNA, 21 nt, synthetic construct
  source 1..21: mol_type = other RNA
ctggtattggggttccattac

SEQ ID NO: 3942 - RNA, 21 nt, synthetic construct
  source 1..21: mol_type = other RNA
ctggtgcagccctttgtacgc

SEQ ID NO: 3943 - RNA, 21 nt, synthetic construct
  source 1..21: mol_type = other RNA
ctggtggaggagcaggcagtg

SEQ ID NO: 3944 - RNA, 21 nt, synthetic construct
  source 1..21: mol_type = other RNA
ctggtggccgacgtggactgc

SEQ ID NO: 3945 - RNA, 21 nt, synthetic construct
  source 1..21: mol_type = other RNA
ctgtacacctaaaactggtgc

SEQ ID NO: 3946 - RNA, 21 nt, synthetic construct
  source 1..21: mol_type = other RNA
ctgtacggggcaatctgccca

SEQ ID NO: 3947 - RNA, 21 nt, synthetic construct
  source 1..21: mol_type = other RNA
ctgtcacgtactaagaacgtg

SEQ ID NO: 3948 - RNA, 21 nt, synthetic construct
  source 1..21: mol_type = other RNA
ctgtcagtgaaaaccactcgt

SEQ ID NO: 3949 - RNA, 21 nt, synthetic construct
  source 1..21: mol_type = other RNA
ctgtcgcttcgggtatcagca

SEQ ID NO: 3950 - RNA, 21 nt, synthetic construct
  source 1..21: mol_type = other RNA
ctgtcggaggtagtcggccat

SEQ ID NO: 3951 - RNA, 21 nt, synthetic construct
  source 1..21: mol_type = other RNA
ctgtgccgccttgtcatcaac

SEQ ID NO: 3952 - RNA, 21 nt, synthetic construct
  source 1..21: mol_type = other RNA
ctgttcacgctgtcagtgaaa

SEQ ID NO: 3953 - RNA, 21 nt, synthetic construct
  source 1..21: mol_type = other RNA
cttaggcataggcagggccgg

SEQ ID NO: 3954 - RNA, 21 nt, synthetic construct
  source 1..21: mol_type = other RNA
cttagtacgtgacagcacgca

SEQ ID NO: 3955 - RNA, 21 nt, synthetic construct
  source 1..21: mol_type = other RNA
cttccagctctgactgtacgg

SEQ ID NO: 3956 - RNA, 21 nt, synthetic construct
  source 1..21: mol_type = other RNA
cttccgtctggactccaactg

SEQ ID NO: 3957 - RNA, 21 nt, synthetic construct
  source 1..21: mol_type = other RNA
cttcgggtatcagcagtgcag

SEQ ID NO: 3958 - RNA, 21 nt, synthetic construct
  source 1..21: mol_type = other RNA
cttctgcaggtgttgtcgggc

SEQ ID NO: 3959 - RNA, 21 nt, synthetic construct
  source 1..21: mol_type = other RNA
cttctgcgtacaaagggctgc

SEQ ID NO: 3960 - RNA, 21 nt, synthetic construct
  source 1..21: mol_type = other RNA
cttctggcatcttctgcaggt

SEQ ID NO: 3961 - RNA, 21 nt, synthetic construct
  source 1..21: mol_type = other RNA
cttgcctaggctggtattggg

SEQ ID NO: 3962 - RNA, 21 nt, synthetic construct
  source 1..21: mol_type = other RNA
cttggccccctctgcacttgc

SEQ ID NO: 3963 - RNA, 21 nt, synthetic construct
  source 1..21: mol_type = other RNA
cttgtcatcaaccgtctggtg

SEQ ID NO: 3964 - RNA, 21 nt, synthetic construct
  source 1..21: mol_type = other RNA
cttgtccaggccacgcatcct

SEQ ID NO: 3965 - RNA, 21 nt, synthetic construct
  source 1..21: mol_type = other RNA
cttgtgcagcactatgtggcc

SEQ ID NO: 3966 - RNA, 21 nt, synthetic construct
  source 1..21: mol_type = other RNA
ctttccggatgtggtcagcct

SEQ ID NO: 3967 - RNA, 21 nt, synthetic construct
  source 1..21: mol_type = other RNA
ctttgtacgcagaagcagtgc

SEQ ID NO: 3968 - RNA, 21 nt, synthetic construct
  source 1..21: mol_type = other RNA
gaaaaccactcgtggccccac

SEQ ID NO: 3969 - RNA, 21 nt, synthetic construct
  source 1..21: mol_type = other RNA
gaaaggccaggatgcgtggcc

SEQ ID NO: 3970 - RNA, 21 nt, synthetic construct
  source 1..21: mol_type = other RNA
gaacaggtagctggggtgcgt

SEQ ID NO: 3971 - RNA, 21 nt, synthetic construct
  source 1..21: mol_type = other RNA
gaaccccaataccagcctagg

SEQ ID NO: 3972 - RNA, 21 nt, synthetic construct
  source 1..21: mol_type = other RNA
gaacgtgccttctggcatctt

SEQ ID NO: 3973 - RNA, 21 nt, synthetic construct
  source 1..21: mol_type = other RNA
gaagatgccagaaggcacgtt

SEQ ID NO: 3974 - RNA, 21 nt, synthetic construct
  source 1..21: mol_type = other RNA
gaagcagtgcccgcagcctgc

SEQ ID NO: 3975 - RNA, 21 nt, synthetic construct
  source 1..21: mol_type = other RNA
gaagcgacagccccgatcctg

SEQ ID NO: 3976 - RNA, 21 nt, synthetic construct
  source 1..21: mol_type = other RNA
gaagctggagtcggcatactc

SEQ ID NO: 3977 - RNA, 21 nt, synthetic construct
  source 1..21: mol_type = other RNA
gaaggcacgttcttagtacgt

SEQ ID NO: 3978 - RNA, 21 nt, synthetic construct
  source 1..21: mol_type = other RNA
gaaggggtactgtcggaggta

SEQ ID NO: 3979 - RNA, 21 nt, synthetic construct
  source 1..21: mol_type = other RNA
gacaacacctgcagaagatgc

SEQ ID NO: 3980 - RNA, 21 nt, synthetic construct
  source 1..21: mol_type = other RNA
gacaagcagttggagtccaga

SEQ ID NO: 3981 - RNA, 21 nt, synthetic construct
  source 1..21: mol_type = other RNA
gacaaggcggcacaggtgttg

SEQ ID NO: 3982 - RNA, 21 nt, synthetic construct
  source 1..21: mol_type = other RNA
gacagcacgcaccccagctac

SEQ ID NO: 3983 - RNA, 21 nt, synthetic construct
  source 1..21: mol_type = other RNA
gacagccccgatcctgctccc

SEQ ID NO: 3984 - RNA, 21 nt, synthetic construct
  source 1..21: mol_type = other RNA
gacagcgtgaacaggtagctg

SEQ ID NO: 3985 - RNA, 21 nt, synthetic construct
  source 1..21: mol_type = other RNA
gacagtaccccttccagctct

SEQ ID NO: 3986 - RNA, 21 nt, synthetic construct
  source 1..21: mol_type = other RNA
gaccacatccggaaaggccag

SEQ ID NO: 3987 - RNA, 21 nt, synthetic construct
  source 1..21: mol_type = other RNA
gacccagcactgcctgctcct

SEQ ID NO: 3988 - RNA, 21 nt, synthetic construct
  source 1..21: mol_type = other RNA
gacggaagctggagtcggcat

SEQ ID NO: 3989 - RNA, 21 nt, synthetic construct
  source 1..21: mol_type = other RNA
gacggttgatgacaaggcggc

SEQ ID NO: 3990 - RNA, 21 nt, synthetic construct
  source 1..21: mol_type = other RNA
gacgtggactgcctgccactg

SEQ ID NO: 3991 - RNA, 21 nt, synthetic construct
  source 1..21: mol_type = other RNA
gactacctccgacagtacccc

SEQ ID NO: 3992 - RNA, 21 nt, synthetic construct
  source 1..21: mol_type = other RNA
gactccaactgcttgtccagg

SEQ ID NO: 3993 - RNA, 21 nt, synthetic construct
  source 1..21: mol_type = other RNA
gactccagcttccgtctggac

SEQ ID NO: 3994 - RNA, 21 nt, synthetic construct
  source 1..21: mol_type = other RNA
gactgcctgccactgccccgg

SEQ ID NO: 3995 - RNA, 21 nt, synthetic construct
  source 1..21: mol_type = other RNA
gactgtacggggcaatctgcc

SEQ ID NO: 3996 - RNA, 21 nt, synthetic construct
  source 1..21: mol_type = other RNA
gagcaggatcggggctgtcgc

SEQ ID NO: 3997 - RNA, 21 nt, synthetic construct
  source 1..21: mol_type = other RNA
gagcaggcagtgctgggtcac

SEQ ID NO: 3998 - RNA, 21 nt, synthetic construct
  source 1..21: mol_type = other RNA
gagctggaaggggtactgtcg

SEQ ID NO: 3999 - RNA, 21 nt, synthetic construct
  source 1..21: mol_type = other RNA
gaggagcaggcagtgctgggt

SEQ ID NO: 4000 - RNA, 21 nt, synthetic construct
  source 1..21: mol_type = other RNA
gaggatgcgcctagtgaccca

SEQ ID NO: 4001 - RNA, 21 nt, synthetic construct
  source 1..21: mol_type = other RNA
gaggccacatagtgctgcaca

SEQ ID NO: 4002 - RNA, 21 nt, synthetic construct
  source 1..21: mol_type = other RNA
gaggcccgacaacacctgcag

SEQ ID NO: 4003 - RNA, 21 nt, synthetic construct
  source 1..21: mol_type = other RNA
gagggtgggcagattgccccg

SEQ ID NO: 4004 - RNA, 21 nt, synthetic construct
  source 1..21: mol_type = other RNA
gaggtagtcggccatgcgccg

SEQ ID NO: 4005 - RNA, 21 nt, synthetic construct
  source 1..21: mol_type = other RNA
gagtatgccgactccagcttc

SEQ ID NO: 4006 - RNA, 21 nt, synthetic construct
  source 1..21: mol_type = other RNA
gagtccagacggaagctggag

SEQ ID NO: 4007 - RNA, 21 nt, synthetic construct
  source 1..21: mol_type = other RNA
gagtcggcatactcaatgcgt

SEQ ID NO: 4008 - RNA, 21 nt, synthetic construct
  source 1..21: mol_type = other RNA
gagtggttttcactgacagcg

SEQ ID NO: 4009 - RNA, 21 nt, synthetic construct
  source 1..21: mol_type = other RNA
gatacccgaagcgacagcccc

SEQ ID NO: 4010 - RNA, 21 nt, synthetic construct
  source 1..21: mol_type = other RNA
gatcctgctcccaccccggcc

SEQ ID NO: 4011 - RNA, 21 nt, synthetic construct
  source 1..21: mol_type = other RNA
gatcggggctgtcgcttcggg

SEQ ID NO: 4012 - RNA, 21 nt, synthetic construct
  source 1..21: mol_type = other RNA
gatgacaaggcggcacaggtg

SEQ ID NO: 4013 - RNA, 21 nt, synthetic construct
  source 1..21: mol_type = other RNA
gatgccagaaggcacgttctt

SEQ ID NO: 4014 - RNA, 21 nt, synthetic construct
  source 1..21: mol_type = other RNA
gatgcgcctagtgacccagca

SEQ ID NO: 4015 - RNA, 21 nt, synthetic construct
  source 1..21: mol_type = other RNA
gatgcgtggcctggacaagca

SEQ ID NO: 4016 - RNA, 21 nt, synthetic construct
  source 1..21: mol_type = other RNA
gatgtggtcagccttgtgcag

SEQ ID NO: 4017 - RNA, 21 nt, synthetic construct
  source 1..21: mol_type = other RNA
gattgccccgtacagtcagag

SEQ ID NO: 4018 - RNA, 21 nt, synthetic construct
  source 1..21: mol_type = other RNA
gcaacacctgtgccgccttgt

SEQ ID NO: 4019 - RNA, 21 nt, synthetic construct
  source 1..21: mol_type = other RNA
gcacaaggctgaccacatccg

SEQ ID NO: 4020 - RNA, 21 nt, synthetic construct
  source 1..21: mol_type = other RNA
gcacaggtgttgcaggctgcg

SEQ ID NO: 4021 - RNA, 21 nt, synthetic construct
  source 1..21: mol_type = other RNA
gcaccagttttaggtgtacag

SEQ ID NO: 4022 - RNA, 21 nt, synthetic construct
  source 1..21: mol_type = other RNA
gcaccccagctacctgttcac

SEQ ID NO: 4023 - RNA, 21 nt, synthetic construct
  source 1..21: mol_type = other RNA
gcacgcaccccagctacctgt

SEQ ID NO: 4024 - RNA, 21 nt, synthetic construct
  source 1..21: mol_type = other RNA
gcacgttcttagtacgtgaca

SEQ ID NO: 4025 - RNA, 21 nt, synthetic construct
  source 1..21: mol_type = other RNA
gcactatgtggcctcctgcac

SEQ ID NO: 4026 - RNA, 21 nt, synthetic construct
  source 1..21: mol_type = other RNA
gcactgcctgctcctccacca

SEQ ID NO: 4027 - RNA, 21 nt, synthetic construct
  source 1..21: mol_type = other RNA
gcactgctgatacccgaagcg

SEQ ID NO: 4028 - RNA, 21 nt, synthetic construct
  source 1..21: mol_type = other RNA
gcactgcttctgcgtacaaag

SEQ ID NO: 4029 - RNA, 21 nt, synthetic construct
  source 1..21: mol_type = other RNA
gcacttgcctaggctggtatt

SEQ ID NO: 4030 - RNA, 21 nt, synthetic construct
  source 1..21: mol_type = other RNA
gcagaagatgccagaaggcac

SEQ ID NO: 4031 - RNA, 21 nt, synthetic construct
  source 1..21: mol_type = other RNA
gcagaagcagtgcccgcagcc

SEQ ID NO: 4032 - RNA, 21 nt, synthetic construct
  source 1..21: mol_type = other RNA
gcagattgccccgtacagtca

SEQ ID NO: 4033 - RNA, 21 nt, synthetic construct
  source 1..21: mol_type = other RNA
gcagcactatgtggcctcctg

SEQ ID NO: 4034 - RNA, 21 nt, synthetic construct
  source 1..21: mol_type = other RNA
gcagccctttgtacgcagaag

SEQ ID NO: 4035 - RNA, 21 nt, synthetic construct
  source 1..21: mol_type = other RNA
gcagcctgcaacacctgtgcc

SEQ ID NO: 4036 - RNA, 21 nt, synthetic construct
  source 1..21: mol_type = other RNA
gcaggaggccacatagtgctg

SEQ ID NO: 4037 - RNA, 21 nt, synthetic construct
  source 1..21: mol_type = other RNA
gcaggatcggggctgtcgctt

SEQ ID NO: 4038 - RNA, 21 nt, synthetic construct
  source 1..21: mol_type = other RNA
gcaggcagtccacgtcggcca

SEQ ID NO: 4039 - RNA, 21 nt, synthetic construct
  source 1..21: mol_type = other RNA
gcaggcagtgctgggtcacta

SEQ ID NO: 4040 - RNA, 21 nt, synthetic construct
  source 1..21: mol_type = other RNA
gcaggctgcgggcactgcttc

SEQ ID NO: 4041 - RNA, 21 nt, synthetic construct
  source 1..21: mol_type = other RNA
gcaggtgttgtcgggcctcgc

SEQ ID NO: 4042 - RNA, 21 nt, synthetic construct
  source 1..21: mol_type = other RNA
gcagtccacgtcggccaccag

SEQ ID NO: 4043 - RNA, 21 nt, synthetic construct
  source 1..21: mol_type = other RNA
gcagtgcaggaggccacatag

SEQ ID NO: 4044 - RNA, 21 nt, synthetic construct
  source 1..21: mol_type = other RNA
gcagtgcccgcagcctgcaac

SEQ ID NO: 4045 - RNA, 21 nt, synthetic construct
  source 1..21: mol_type = other RNA
gcagtgctgggtcactaggcg

SEQ ID NO: 4046 - RNA, 21 nt, synthetic construct
  source 1..21: mol_type = other RNA
gcagtggcaggcagtccacgt

SEQ ID NO: 4047 - RNA, 21 nt, synthetic construct
  source 1..21: mol_type = other RNA
gcagtggctggtggaggagca

SEQ ID NO: 4048 - RNA, 21 nt, synthetic construct
  source 1..21: mol_type = other RNA
gcagttggagtccagacggaa

SEQ ID NO: 4049 - RNA, 21 nt, synthetic construct
  source 1..21: mol_type = other RNA
gcatactcaatgcgtacattg

SEQ ID NO: 4050 - RNA, 21 nt, synthetic construct
  source 1..21: mol_type = other RNA
gcataggcagggccggggtgg

SEQ ID NO: 4051 - RNA, 21 nt, synthetic construct
  source 1..21: mol_type = other RNA
gcatcctccttaggcataggc

SEQ ID NO: 4052 - RNA, 21 nt, synthetic construct
  source 1..21: mol_type = other RNA
gcatcctggcctttccggatg

SEQ ID NO: 4053 - RNA, 21 nt, synthetic construct
  source 1..21: mol_type = other RNA
gcatcttctgcaggtgttgtc

SEQ ID NO: 4054 - RNA, 21 nt, synthetic construct
  source 1..21: mol_type = other RNA
gcatggccgactacctccgac

SEQ ID NO: 4055 - RNA, 21 nt, synthetic construct
  source 1..21: mol_type = other RNA
gcattgagtatgccgactcca

SEQ ID NO: 4056 - RNA, 21 nt, synthetic construct
  source 1..21: mol_type = other RNA
gccacatagtgctgcacaagg

SEQ ID NO: 4057 - RNA, 21 nt, synthetic construct
  source 1..21: mol_type = other RNA
gccaccagacggttgatgaca

SEQ ID NO: 4058 - RNA, 21 nt, synthetic construct
  source 1..21: mol_type = other RNA
gccacgagtggttttcactga

SEQ ID NO: 4059 - RNA, 21 nt, synthetic construct
  source 1..21: mol_type = other RNA
gccacgcatcctggcctttcc

SEQ ID NO: 4060 - RNA, 21 nt, synthetic construct
  source 1..21: mol_type = other RNA
gccactgctgtacacctaaaa

SEQ ID NO: 4061 - RNA, 21 nt, synthetic construct
  source 1..21: mol_type = other RNA
gccagaaggcacgttcttagt

SEQ ID NO: 4062 - RNA, 21 nt, synthetic construct
  source 1..21: mol_type = other RNA
gccagcgaggcccgacaacac

SEQ ID NO: 4063 - RNA, 21 nt, synthetic construct
  source 1..21: mol_type = other RNA
gccaggatgcgtggcctggac

SEQ ID NO: 4064 - RNA, 21 nt, synthetic construct
  source 1..21: mol_type = other RNA
gccccaccaatgtacgcattg

SEQ ID NO: 4065 - RNA, 21 nt, synthetic construct
  source 1..21: mol_type = other RNA
gccccctctgcacttgcctag

SEQ ID NO: 4066 - RNA, 21 nt, synthetic construct
  source 1..21: mol_type = other RNA
gccccgatcctgctcccaccc

SEQ ID NO: 4067 - RNA, 21 nt, synthetic construct
  source 1..21: mol_type = other RNA
gccccggcgcatggccgacta

SEQ ID NO: 4068 - RNA, 21 nt, synthetic construct
  source 1..21: mol_type = other RNA
gccccgtacagtcagagctgg

SEQ ID NO: 4069 - RNA, 21 nt, synthetic construct
  source 1..21: mol_type = other RNA
gcccgacaacacctgcagaag

SEQ ID NO: 4070 - RNA, 21 nt, synthetic construct
  source 1..21: mol_type = other RNA
gcccgcagcctgcaacacctg

SEQ ID NO: 4071 - RNA, 21 nt, synthetic construct
  source 1..21: mol_type = other RNA
gccctgcctatgcctaaggag

SEQ ID NO: 4072 - RNA, 21 nt, synthetic construct
  source 1..21: mol_type = other RNA
gccctttgtacgcagaagcag

SEQ ID NO: 4073 - RNA, 21 nt, synthetic construct
  source 1..21: mol_type = other RNA
gccgacgtggactgcctgcca

SEQ ID NO: 4074 - RNA, 21 nt, synthetic construct
  source 1..21: mol_type = other RNA
gccgactacctccgacagtac

SEQ ID NO: 4075 - RNA, 21 nt, synthetic construct
  source 1..21: mol_type = other RNA
gccgactccagcttccgtctg

SEQ ID NO: 4076 - RNA, 21 nt, synthetic construct
  source 1..21: mol_type = other RNA
gccgccttgtcatcaaccgtc

SEQ ID NO: 4077 - RNA, 21 nt, synthetic construct
  source 1..21: mol_type = other RNA
gccggggcagtggcaggcagt

SEQ ID NO: 4078 - RNA, 21 nt, synthetic construct
  source 1..21: mol_type = other RNA
gccggggtgggagcaggatcg

SEQ ID NO: 4079 - RNA, 21 nt, synthetic construct
  source 1..21: mol_type = other RNA
gccgtaatggaaccccaatac

SEQ ID NO: 4080 - RNA, 21 nt, synthetic construct
  source 1..21: mol_type = other RNA
gcctaaggaggatgcgcctag

SEQ ID NO: 4081 - RNA, 21 nt, synthetic construct
  source 1..21: mol_type = other RNA
gcctaggcaagtgcagagggg

SEQ ID NO: 4082 - RNA, 21 nt, synthetic construct
  source 1..21: mol_type = other RNA
gcctaggctggtattggggtt

SEQ ID NO: 4083 - RNA, 21 nt, synthetic construct
  source 1..21: mol_type = other RNA
gcctagtgacccagcactgcc

SEQ ID NO: 4084 - RNA, 21 nt, synthetic construct
  source 1..21: mol_type = other RNA
gcctatgcctaaggaggatgc

SEQ ID NO: 4085 - RNA, 21 nt, synthetic construct
  source 1..21: mol_type = other RNA
gcctcctgcactgctgatacc

SEQ ID NO: 4086 - RNA, 21 nt, synthetic construct
  source 1..21: mol_type = other RNA
gcctcgctggccgtaatggaa

SEQ ID NO: 4087 - RNA, 21 nt, synthetic construct
  source 1..21: mol_type = other RNA
gcctgcaacacctgtgccgcc

SEQ ID NO: 4088 - RNA, 21 nt, synthetic construct
  source 1..21: mol_type = other RNA
gcctgctcctccaccagccac

SEQ ID NO: 4089 - RNA, 21 nt, synthetic construct
  source 1..21: mol_type = other RNA
gcctggacaagcagttggagt

SEQ ID NO: 4090 - RNA, 21 nt, synthetic construct
  source 1..21: mol_type = other RNA
gccttctggcatcttctgcag

SEQ ID NO: 4091 - RNA, 21 nt, synthetic construct
  source 1..21: mol_type = other RNA
gccttgtcatcaaccgtctgg

SEQ ID NO: 4092 - RNA, 21 nt, synthetic construct
  source 1..21: mol_type = other RNA
gccttgtgcagcactatgtgg

SEQ ID NO: 4093 - RNA, 21 nt, synthetic construct
  source 1..21: mol_type = other RNA
gcctttccggatgtggtcagc

SEQ ID NO: 4094 - RNA, 21 nt, synthetic construct
  source 1..21: mol_type = other RNA
gcgacagccccgatcctgctc

SEQ ID NO: 4095 - RNA, 21 nt, synthetic construct
  source 1..21: mol_type = other RNA
gcgaggcccgacaacacctgc

SEQ ID NO: 4096 - RNA, 21 nt, synthetic construct
  source 1..21: mol_type = other RNA
gcgcatcctccttaggcatag

SEQ ID NO: 4097 - RNA, 21 nt, synthetic construct
  source 1..21: mol_type = other RNA
gcgcatggccgactacctccg

SEQ ID NO: 4098 - RNA, 21 nt, synthetic construct
  source 1..21: mol_type = other RNA
gcgcctagtgacccagcactg

SEQ ID NO: 4099 - RNA, 21 nt, synthetic construct
  source 1..21: mol_type = other RNA
gcggcacaggtgttgcaggct

SEQ ID NO: 4100 - RNA, 21 nt, synthetic construct
  source 1..21: mol_type = other RNA
gcgggcactgcttctgcgtac

SEQ ID NO: 4101 - RNA, 21 nt, synthetic construct
  source 1..21: mol_type = other RNA
gcgtacaaagggctgcaccag

SEQ ID NO: 4102 - RNA, 21 nt, synthetic construct
  source 1..21: mol_type = other RNA
gcgtacattggtggggccacg

SEQ ID NO: 4103 - RNA, 21 nt, synthetic construct
  source 1..21: mol_type = other RNA
gcgtgaacaggtagctggggt

SEQ ID NO: 4104 - RNA, 21 nt, synthetic construct
  source 1..21: mol_type = other RNA
gcgtgctgtcacgtactaaga

SEQ ID NO: 4105 - RNA, 21 nt, synthetic construct
  source 1..21: mol_type = other RNA
gcgtggcctggacaagcagtt

SEQ ID NO: 4106 - RNA, 21 nt, synthetic construct
  source 1..21: mol_type = other RNA
gctacctgttcacgctgtcag

SEQ ID NO: 4107 - RNA, 21 nt, synthetic construct
  source 1..21: mol_type = other RNA
gctcctccaccagccactgct

SEQ ID NO: 4108 - RNA, 21 nt, synthetic construct
  source 1..21: mol_type = other RNA
gctctgactgtacggggcaat

SEQ ID NO: 4109 - RNA, 21 nt, synthetic construct
  source 1..21: mol_type = other RNA
gctgaccacatccggaaaggc

SEQ ID NO: 4110 - RNA, 21 nt, synthetic construct
  source 1..21: mol_type = other RNA
gctgatacccgaagcgacagc

SEQ ID NO: 4111 - RNA, 21 nt, synthetic construct
  source 1..21: mol_type = other RNA
gctgcacaaggctgaccacat

SEQ ID NO: 4112 - RNA, 21 nt, synthetic construct
  source 1..21: mol_type = other RNA
gctgcaccagttttaggtgta

SEQ ID NO: 4113 - RNA, 21 nt, synthetic construct
  source 1..21: mol_type = other RNA
gctgcgggcactgcttctgcg

SEQ ID NO: 4114 - RNA, 21 nt, synthetic construct
  source 1..21: mol_type = other RNA
gctggaaggggtactgtcgga

SEQ ID NO: 4115 - RNA, 21 nt, synthetic construct
  source 1..21: mol_type = other RNA
gctggagtcggcatactcaat

SEQ ID NO: 4116 - RNA, 21 nt, synthetic construct
  source 1..21: mol_type = other RNA
gctggccgtaatggaacccca

SEQ ID NO: 4117 - RNA, 21 nt, synthetic construct
  source 1..21: mol_type = other RNA
gctggggtgcgtgctgtcacg

SEQ ID NO: 4118 - RNA, 21 nt, synthetic construct
  source 1..21: mol_type = other RNA
gctgggtcactaggcgcatcc

SEQ ID NO: 4119 - RNA, 21 nt, synthetic construct
  source 1..21: mol_type = other RNA
gctggtattggggttccatta

SEQ ID NO: 4120 - RNA, 21 nt, synthetic construct
  source 1..21: mol_type = other RNA
gctggtggaggagcaggcagt

SEQ ID NO: 4121 - RNA, 21 nt, synthetic construct
  source 1..21: mol_type = other RNA
gctgtacacctaaaactggtg

SEQ ID NO: 4122 - RNA, 21 nt, synthetic construct
  source 1..21: mol_type = other RNA
gctgtcacgtactaagaacgt

SEQ ID NO: 4123 - RNA, 21 nt, synthetic construct
  source 1..21: mol_type = other RNA
gctgtcagtgaaaaccactcg

SEQ ID NO: 4124 - RNA, 21 nt, synthetic construct
  source 1..21: mol_type = other RNA
gctgtcgcttcgggtatcagc

SEQ ID NO: 4125 - RNA, 21 nt, synthetic construct
  source 1..21: mol_type = other RNA
gcttccgtctggactccaact

SEQ ID NO: 4126 - RNA, 21 nt, synthetic construct
  source 1..21: mol_type = other RNA
gcttcgggtatcagcagtgca

SEQ ID NO: 4127 - RNA, 21 nt, synthetic construct
  source 1..21: mol_type = other RNA
gcttctgcgtacaaagggctg

SEQ ID NO: 4128 - RNA, 21 nt, synthetic construct
  source 1..21: mol_type = other RNA
gcttgtccaggccacgcatcc

SEQ ID NO: 4129 - RNA, 21 nt, synthetic construct
  source 1..21: mol_type = other RNA
ggaaaggccaggatgcgtggc

SEQ ID NO: 4130 - RNA, 21 nt, synthetic construct
  source 1..21: mol_type = other RNA
ggaaccccaataccagcctag

SEQ ID NO: 4131 - RNA, 21 nt, synthetic construct
  source 1..21: mol_type = other RNA
ggaagctggagtcggcatact

SEQ ID NO: 4132 - RNA, 21 nt, synthetic construct
  source 1..21: mol_type = other RNA
ggaaggggtactgtcggaggt

SEQ ID NO: 4133 - RNA, 21 nt, synthetic construct
  source 1..21: mol_type = other RNA
ggacaagcagttggagtccag

SEQ ID NO: 4134 - RNA, 21 nt, synthetic construct
  source 1..21: mol_type = other RNA
ggactccaactgcttgtccag

SEQ ID NO: 4135 - RNA, 21 nt, synthetic construct
  source 1..21: mol_type = other RNA
ggactgcctgccactgccccg

SEQ ID NO: 4136 - RNA, 21 nt, synthetic construct
  source 1..21: mol_type = other RNA
ggagcaggatcggggctgtcg

SEQ ID NO: 4137 - RNA, 21 nt, synthetic construct
  source 1..21: mol_type = other RNA
ggagcaggcagtgctgggtca

SEQ ID NO: 4138 - RNA, 21 nt, synthetic construct
  source 1..21: mol_type = other RNA
ggaggagcaggcagtgctggg

SEQ ID NO: 4139 - RNA, 21 nt, synthetic construct
  source 1..21: mol_type = other RNA
ggaggatgcgcctagtgaccc

SEQ ID NO: 4140 - RNA, 21 nt, synthetic construct
  source 1..21: mol_type = other RNA
ggaggccacatagtgctgcac

SEQ ID NO: 4141 - RNA, 21 nt, synthetic construct
  source 1..21: mol_type = other RNA
ggaggtagtcggccatgcgcc

SEQ ID NO: 4142 - RNA, 21 nt, synthetic construct
  source 1..21: mol_type = other RNA
ggagtccagacggaagctgga

SEQ ID NO: 4143 - RNA, 21 nt, synthetic construct
  source 1..21: mol_type = other RNA
ggagtcggcatactcaatgcg

SEQ ID NO: 4144 - RNA, 21 nt, synthetic construct
  source 1..21: mol_type = other RNA
ggatcggggctgtcgcttcgg

SEQ ID NO: 4145 - RNA, 21 nt, synthetic construct
  source 1..21: mol_type = other RNA
ggatgcgcctagtgacccagc

SEQ ID NO: 4146 - RNA, 21 nt, synthetic construct
  source 1..21: mol_type = other RNA
ggatgcgtggcctggacaagc

SEQ ID NO: 4147 - RNA, 21 nt, synthetic construct
  source 1..21: mol_type = other RNA
ggatgtggtcagccttgtgca

SEQ ID NO: 4148 - RNA, 21 nt, synthetic construct
  source 1..21: mol_type = other RNA
ggcacaggtgttgcaggctgc

SEQ ID NO: 4149 - RNA, 21 nt, synthetic construct
  source 1..21: mol_type = other RNA
ggcacgttcttagtacgtgac

SEQ ID NO: 4150 - RNA, 21 nt, synthetic construct
  source 1..21: mol_type = other RNA
ggcactgcttctgcgtacaaa

SEQ ID NO: 4151 - RNA, 21 nt, synthetic construct
  source 1..21: mol_type = other RNA
ggcagattgccccgtacagtc

SEQ ID NO: 4152 - RNA, 21 nt, synthetic construct
  source 1..21: mol_type = other RNA
ggcaggcagtccacgtcggcc

SEQ ID NO: 4153 - RNA, 21 nt, synthetic construct
  source 1..21: mol_type = other RNA
ggcagtccacgtcggccacca

SEQ ID NO: 4154 - RNA, 21 nt, synthetic construct
  source 1..21: mol_type = other RNA
ggcagtgctgggtcactaggc

SEQ ID NO: 4155 - RNA, 21 nt, synthetic construct
  source 1..21: mol_type = other RNA
ggcagtggcaggcagtccacg

SEQ ID NO: 4156 - RNA, 21 nt, synthetic construct
  source 1..21: mol_type = other RNA
ggcatactcaatgcgtacatt

SEQ ID NO: 4157 - RNA, 21 nt, synthetic construct
  source 1..21: mol_type = other RNA
ggcataggcagggccggggtg

SEQ ID NO: 4158 - RNA, 21 nt, synthetic construct
  source 1..21: mol_type = other RNA
ggcatcttctgcaggtgttgt

SEQ ID NO: 4159 - RNA, 21 nt, synthetic construct
  source 1..21: mol_type = other RNA
ggccacatagtgctgcacaag

SEQ ID NO: 4160 - RNA, 21 nt, synthetic construct
  source 1..21: mol_type = other RNA
ggccaccagacggttgatgac

SEQ ID NO: 4161 - RNA, 21 nt, synthetic construct
  source 1..21: mol_type = other RNA
ggccacgagtggttttcactg

SEQ ID NO: 4162 - RNA, 21 nt, synthetic construct
  source 1..21: mol_type = other RNA
ggccacgcatcctggcctttc

SEQ ID NO: 4163 - RNA, 21 nt, synthetic construct
  source 1..21: mol_type = other RNA
ggccagcgaggcccgacaaca

SEQ ID NO: 4164 - RNA, 21 nt, synthetic construct
  source 1..21: mol_type = other RNA
ggccaggatgcgtggcctgga

SEQ ID NO: 4165 - RNA, 21 nt, synthetic construct
  source 1..21: mol_type = other RNA
ggccccaccaatgtacgcatt

SEQ ID NO: 4166 - RNA, 21 nt, synthetic construct
  source 1..21: mol_type = other RNA
ggccccctctgcacttgccta

SEQ ID NO: 4167 - RNA, 21 nt, synthetic construct
  source 1..21: mol_type = other RNA
ggcccgacaacacctgcagaa

SEQ ID NO: 4168 - RNA, 21 nt, synthetic construct
  source 1..21: mol_type = other RNA
ggccctgcctatgcctaagga

SEQ ID NO: 4169 - RNA, 21 nt, synthetic construct
  source 1..21: mol_type = other RNA
ggccgacgtggactgcctgcc

SEQ ID NO: 4170 - RNA, 21 nt, synthetic construct
  source 1..21: mol_type = other RNA
ggccgactacctccgacagta

SEQ ID NO: 4171 - RNA, 21 nt, synthetic construct
  source 1..21: mol_type = other RNA
ggccggggtgggagcaggatc

SEQ ID NO: 4172 - RNA, 21 nt, synthetic construct
  source 1..21: mol_type = other RNA
ggccgtaatggaaccccaata

SEQ ID NO: 4173 - RNA, 21 nt, synthetic construct
  source 1..21: mol_type = other RNA
ggcctcctgcactgctgatac

SEQ ID NO: 4174 - RNA, 21 nt, synthetic construct
  source 1..21: mol_type = other RNA
ggcctcgctggccgtaatgga

SEQ ID NO: 4175 - RNA, 21 nt, synthetic construct
  source 1..21: mol_type = other RNA
ggcctggacaagcagttggag

SEQ ID NO: 4176 - RNA, 21 nt, synthetic construct
  source 1..21: mol_type = other RNA
ggcctttccggatgtggtcag

SEQ ID NO: 4177 - RNA, 21 nt, synthetic construct
  source 1..21: mol_type = other RNA
ggcgcatcctccttaggcata

SEQ ID NO: 4178 - RNA, 21 nt, synthetic construct
  source 1..21: mol_type = other RNA
ggcgcatggccgactacctcc

SEQ ID NO: 4179 - RNA, 21 nt, synthetic construct
  source 1..21: mol_type = other RNA
ggcggcacaggtgttgcaggc

SEQ ID NO: 4180 - RNA, 21 nt, synthetic construct
  source 1..21: mol_type = other RNA
ggctgaccacatccggaaagg

SEQ ID NO: 4181 - RNA, 21 nt, synthetic construct
  source 1..21: mol_type = other RNA
ggctgcaccagttttaggtgt

SEQ ID NO: 4182 - RNA, 21 nt, synthetic construct
  source 1..21: mol_type = other RNA
ggctgcgggcactgcttctgc

SEQ ID NO: 4183 - RNA, 21 nt, synthetic construct
  source 1..21: mol_type = other RNA
ggctggtattggggttccatt

SEQ ID NO: 4184 - RNA, 21 nt, synthetic construct
  source 1..21: mol_type = other RNA
ggctggtggaggagcaggcag

SEQ ID NO: 4185 - RNA, 21 nt, synthetic construct
  source 1..21: mol_type = other RNA
ggctgtcgcttcgggtatcag

SEQ ID NO: 4186 - RNA, 21 nt, synthetic construct
  source 1..21: mol_type = other RNA
gggagcaggatcggggctgtc

SEQ ID NO: 4187 - RNA, 21 nt, synthetic construct
  source 1..21: mol_type = other RNA
gggcactgcttctgcgtacaa

SEQ ID NO: 4188 - RNA, 21 nt, synthetic construct
  source 1..21: mol_type = other RNA
gggcagattgccccgtacagt

SEQ ID NO: 4189 - RNA, 21 nt, synthetic construct
  source 1..21: mol_type = other RNA
gggcagtggcaggcagtccac

SEQ ID NO: 4190 - RNA, 21 nt, synthetic construct
  source 1..21: mol_type = other RNA
gggccacgagtggttttcact

SEQ ID NO: 4191 - RNA, 21 nt, synthetic construct
  source 1..21: mol_type = other RNA
gggccggggtgggagcaggat

SEQ ID NO: 4192 - RNA, 21 nt, synthetic construct
  source 1..21: mol_type = other RNA
gggcctcgctggccgtaatgg

SEQ ID NO: 4193 - RNA, 21 nt, synthetic construct
  source 1..21: mol_type = other RNA
gggctgcaccagttttaggtg

SEQ ID NO: 4194 - RNA, 21 nt, synthetic construct
  source 1..21: mol_type = other RNA
gggctgtcgcttcgggtatca

SEQ ID NO: 4195 - RNA, 21 nt, synthetic construct
  source 1..21: mol_type = other RNA
ggggcagtggcaggcagtcca

SEQ ID NO: 4196 - RNA, 21 nt, synthetic construct
  source 1..21: mol_type = other RNA
ggggccacgagtggttttcac

SEQ ID NO: 4197 - RNA, 21 nt, synthetic construct
  source 1..21: mol_type = other RNA
ggggctgtcgcttcgggtatc

SEQ ID NO: 4198 - RNA, 21 nt, synthetic construct
  source 1..21: mol_type = other RNA
ggggtactgtcggaggtagtc

SEQ ID NO: 4199 - RNA, 21 nt, synthetic construct
  source 1..21: mol_type = other RNA
ggggtgcgtgctgtcacgtac

SEQ ID NO: 4200 - RNA, 21 nt, synthetic construct
  source 1..21: mol_type = other RNA
ggggtgggagcaggatcgggg

SEQ ID NO: 4201 - RNA, 21 nt, synthetic construct
  source 1..21: mol_type = other RNA
ggggttccattacggccagcg

SEQ ID NO: 4202 - RNA, 21 nt, synthetic construct
  source 1..21: mol_type = other RNA
gggtactgtcggaggtagtcg

SEQ ID NO: 4203 - RNA, 21 nt, synthetic construct
  source 1..21: mol_type = other RNA
gggtatcagcagtgcaggagg

SEQ ID NO: 4204 - RNA, 21 nt, synthetic construct
  source 1..21: mol_type = other RNA
gggtcactaggcgcatcctcc

SEQ ID NO: 4205 - RNA, 21 nt, synthetic construct
  source 1..21: mol_type = other RNA
gggtgagggtgggcagattgc

SEQ ID NO: 4206 - RNA, 21 nt, synthetic construct
  source 1..21: mol_type = other RNA
gggtgcgtgctgtcacgtact

SEQ ID NO: 4207 - RNA, 21 nt, synthetic construct
  source 1..21: mol_type = other RNA
gggtgggagcaggatcggggc

SEQ ID NO: 4208 - RNA, 21 nt, synthetic construct
  source 1..21: mol_type = other RNA
gggtgggcagattgccccgta

SEQ ID NO: 4209 - RNA, 21 nt, synthetic construct
  source 1..21: mol_type = other RNA
gggttccattacggccagcga

SEQ ID NO: 4210 - RNA, 21 nt, synthetic construct
  source 1..21: mol_type = other RNA
ggtactgtcggaggtagtcgg

SEQ ID NO: 4211 - RNA, 21 nt, synthetic construct
  source 1..21: mol_type = other RNA
ggtagctggggtgcgtgctgt

SEQ ID NO: 4212 - RNA, 21 nt, synthetic construct
  source 1..21: mol_type = other RNA
ggtagtcggccatgcgccggg

SEQ ID NO: 4213 - RNA, 21 nt, synthetic construct
  source 1..21: mol_type = other RNA
ggtatcagcagtgcaggaggc

SEQ ID NO: 4214 - RNA, 21 nt, synthetic construct
  source 1..21: mol_type = other RNA
ggtattggggttccattacgg

SEQ ID NO: 4215 - RNA, 21 nt, synthetic construct
  source 1..21: mol_type = other RNA
ggtcactaggcgcatcctcct

SEQ ID NO: 4216 - RNA, 21 nt, synthetic construct
  source 1..21: mol_type = other RNA
ggtcagccttgtgcagcacta

SEQ ID NO: 4217 - RNA, 21 nt, synthetic construct
  source 1..21: mol_type = other RNA
ggtgagggtgggcagattgcc

SEQ ID NO: 4218 - RNA, 21 nt, synthetic construct
  source 1..21: mol_type = other RNA
ggtgcagccctttgtacgcag

SEQ ID NO: 4219 - RNA, 21 nt, synthetic construct
  source 1..21: mol_type = other RNA
ggtgcgtgctgtcacgtacta

SEQ ID NO: 4220 - RNA, 21 nt, synthetic construct
  source 1..21: mol_type = other RNA
ggtggaggagcaggcagtgct

SEQ ID NO: 4221 - RNA, 21 nt, synthetic construct
  source 1..21: mol_type = other RNA
ggtggccgacgtggactgcct

SEQ ID NO: 4222 - RNA, 21 nt, synthetic construct
  source 1..21: mol_type = other RNA
ggtgggagcaggatcggggct

SEQ ID NO: 4223 - RNA, 21 nt, synthetic construct
  source 1..21: mol_type = other RNA
ggtgggcagattgccccgtac

SEQ ID NO: 4224 - RNA, 21 nt, synthetic construct
  source 1..21: mol_type = other RNA
ggtggggccacgagtggtttt

SEQ ID NO: 4225 - RNA, 21 nt, synthetic construct
  source 1..21: mol_type = other RNA
ggtgtacagcagtggctggtg

SEQ ID NO: 4226 - RNA, 21 nt, synthetic construct
  source 1..21: mol_type = other RNA
ggtgttgcaggctgcgggcac

SEQ ID NO: 4227 - RNA, 21 nt, synthetic construct
  source 1..21: mol_type = other RNA
ggtgttgtcgggcctcgctgg

SEQ ID NO: 4228 - RNA, 21 nt, synthetic construct
  source 1..21: mol_type = other RNA
ggttccattacggccagcgag

SEQ ID NO: 4229 - RNA, 21 nt, synthetic construct
  source 1..21: mol_type = other RNA
ggttgatgacaaggcggcaca

SEQ ID NO: 4230 - RNA, 21 nt, synthetic construct
  source 1..21: mol_type = other RNA
ggttttcactgacagcgtgaa

SEQ ID NO: 4231 - RNA, 21 nt, synthetic construct
  source 1..21: mol_type = other RNA
gtaatggaaccccaataccag

SEQ ID NO: 4232 - RNA, 21 nt, synthetic construct
  source 1..21: mol_type = other RNA
gtacaaagggctgcaccagtt

SEQ ID NO: 4233 - RNA, 21 nt, synthetic construct
  source 1..21: mol_type = other RNA
gtacacctaaaactggtgcag

SEQ ID NO: 4234 - RNA, 21 nt, synthetic construct
  source 1..21: mol_type = other RNA
gtacagcagtggctggtggag

SEQ ID NO: 4235 - RNA, 21 nt, synthetic construct
  source 1..21: mol_type = other RNA
gtacagtcagagctggaaggg

SEQ ID NO: 4236 - RNA, 21 nt, synthetic construct
  source 1..21: mol_type = other RNA
gtacattggtggggccacgag

SEQ ID NO: 4237 - RNA, 21 nt, synthetic construct
  source 1..21: mol_type = other RNA
gtaccccttccagctctgact

SEQ ID NO: 4238 - RNA, 21 nt, synthetic construct
  source 1..21: mol_type = other RNA
gtacgcagaagcagtgcccgc

SEQ ID NO: 4239 - RNA, 21 nt, synthetic construct
  source 1..21: mol_type = other RNA
gtacgcattgagtatgccgac

SEQ ID NO: 4240 - RNA, 21 nt, synthetic construct
  source 1..21: mol_type = other RNA
gtacggggcaatctgcccacc

SEQ ID NO: 4241 - RNA, 21 nt, synthetic construct
  source 1..21: mol_type = other RNA
gtacgtgacagcacgcacccc

SEQ ID NO: 4242 - RNA, 21 nt, synthetic construct
  source 1..21: mol_type = other RNA
gtactaagaacgtgccttctg

SEQ ID NO: 4243 - RNA, 21 nt, synthetic construct
  source 1..21: mol_type = other RNA
gtactgtcggaggtagtcggc

SEQ ID NO: 4244 - RNA, 21 nt, synthetic construct
  source 1..21: mol_type = other RNA
gtagctggggtgcgtgctgtc

SEQ ID NO: 4245 - RNA, 21 nt, synthetic construct
  source 1..21: mol_type = other RNA
gtagtcggccatgcgccgggg

SEQ ID NO: 4246 - RNA, 21 nt, synthetic construct
  source 1..21: mol_type = other RNA
gtatcagcagtgcaggaggcc

SEQ ID NO: 4247 - RNA, 21 nt, synthetic construct
  source 1..21: mol_type = other RNA
gtatgccgactccagcttccg

SEQ ID NO: 4248 - RNA, 21 nt, synthetic construct
  source 1..21: mol_type = other RNA
gtattggggttccattacggc

SEQ ID NO: 4249 - RNA, 21 nt, synthetic construct
  source 1..21: mol_type = other RNA
gtcacgtactaagaacgtgcc

SEQ ID NO: 4250 - RNA, 21 nt, synthetic construct
  source 1..21: mol_type = other RNA
gtcactaggcgcatcctcctt

SEQ ID NO: 4251 - RNA, 21 nt, synthetic construct
  source 1..21: mol_type = other RNA
gtcagagctggaaggggtact

SEQ ID NO: 4252 - RNA, 21 nt, synthetic construct
  source 1..21: mol_type = other RNA
gtcagccttgtgcagcactat

SEQ ID NO: 4253 - RNA, 21 nt, synthetic construct
  source 1..21: mol_type = other RNA
gtcagtgaaaaccactcgtgg

SEQ ID NO: 4254 - RNA, 21 nt, synthetic construct
  source 1..21: mol_type = other RNA
gtcatcaaccgtctggtggcc

SEQ ID NO: 4255 - RNA, 21 nt, synthetic construct
  source 1..21: mol_type = other RNA
gtccacgtcggccaccagacg

SEQ ID NO: 4256 - RNA, 21 nt, synthetic construct
  source 1..21: mol_type = other RNA
gtccagacggaagctggagtc

SEQ ID NO: 4257 - RNA, 21 nt, synthetic construct
  source 1..21: mol_type = other RNA
gtccaggccacgcatcctggc

SEQ ID NO: 4258 - RNA, 21 nt, synthetic construct
  source 1..21: mol_type = other RNA
gtcccttggccccctctgcac

SEQ ID NO: 4259 - RNA, 21 nt, synthetic construct
  source 1..21: mol_type = other RNA
gtcgcttcgggtatcagcagt

SEQ ID NO: 4260 - RNA, 21 nt, synthetic construct
  source 1..21: mol_type = other RNA
gtcggaggtagtcggccatgc

SEQ ID NO: 4261 - RNA, 21 nt, synthetic construct
  source 1..21: mol_type = other RNA
gtcggcatactcaatgcgtac

SEQ ID NO: 4262 - RNA, 21 nt, synthetic construct
  source 1..21: mol_type = other RNA
gtcggccaccagacggttgat

SEQ ID NO: 4263 - RNA, 21 nt, synthetic construct
  source 1..21: mol_type = other RNA
gtcgggcctcgctggccgtaa

SEQ ID NO: 4264 - RNA, 21 nt, synthetic construct
  source 1..21: mol_type = other RNA
gtctggactccaactgcttgt

SEQ ID NO: 4265 - RNA, 21 nt, synthetic construct
  source 1..21: mol_type = other RNA
gtctggtggccgacgtggact

SEQ ID NO: 4266 - RNA, 21 nt, synthetic construct
  source 1..21: mol_type = other RNA
gtgaaaaccactcgtggcccc

SEQ ID NO: 4267 - RNA, 21 nt, synthetic construct
  source 1..21: mol_type = other RNA
gtgaacaggtagctggggtgc

SEQ ID NO: 4268 - RNA, 21 nt, synthetic construct
  source 1..21: mol_type = other RNA
gtgacagcacgcaccccagct

SEQ ID NO: 4269 - RNA, 21 nt, synthetic construct
  source 1..21: mol_type = other RNA
gtgacccagcactgcctgctc

SEQ ID NO: 4270 - RNA, 21 nt, synthetic construct
  source 1..21: mol_type = other RNA
gtgagggtgggcagattgccc

SEQ ID NO: 4271 - RNA, 21 nt, synthetic construct
  source 1..21: mol_type = other RNA
gtgcagcactatgtggcctcc

SEQ ID NO: 4272 - RNA, 21 nt, synthetic construct
  source 1..21: mol_type = other RNA
gtgcagccctttgtacgcaga

SEQ ID NO: 4273 - RNA, 21 nt, synthetic construct
  source 1..21: mol_type = other RNA
gtgcaggaggccacatagtgc

SEQ ID NO: 4274 - RNA, 21 nt, synthetic construct
  source 1..21: mol_type = other RNA
gtgcccgcagcctgcaacacc

SEQ ID NO: 4275 - RNA, 21 nt, synthetic construct
  source 1..21: mol_type = other RNA
gtgccgccttgtcatcaaccg

SEQ ID NO: 4276 - RNA, 21 nt, synthetic construct
  source 1..21: mol_type = other RNA
gtgccttctggcatcttctgc

SEQ ID NO: 4277 - RNA, 21 nt, synthetic construct
  source 1..21: mol_type = other RNA
gtgcgtgctgtcacgtactaa

SEQ ID NO: 4278 - RNA, 21 nt, synthetic construct
  source 1..21: mol_type = other RNA
gtgctgcacaaggctgaccac

SEQ ID NO: 4279 - RNA, 21 nt, synthetic construct
  source 1..21: mol_type = other RNA
gtgctgggtcactaggcgcat

SEQ ID NO: 4280 - RNA, 21 nt, synthetic construct
  source 1..21: mol_type = other RNA
gtgctgtcacgtactaagaac

SEQ ID NO: 4281 - RNA, 21 nt, synthetic construct
  source 1..21: mol_type = other RNA
gtggactgcctgccactgccc

SEQ ID NO: 4282 - RNA, 21 nt, synthetic construct
  source 1..21: mol_type = other RNA
gtggaggagcaggcagtgctg

SEQ ID NO: 4283 - RNA, 21 nt, synthetic construct
  source 1..21: mol_type = other RNA
gtggcaggcagtccacgtcgg

SEQ ID NO: 4284 - RNA, 21 nt, synthetic construct
  source 1..21: mol_type = other RNA
gtggccccaccaatgtacgca

SEQ ID NO: 4285 - RNA, 21 nt, synthetic construct
  source 1..21: mol_type = other RNA
gtggccgacgtggactgcctg

SEQ ID NO: 4286 - RNA, 21 nt, synthetic construct
  source 1..21: mol_type = other RNA
gtggcctcctgcactgctgat

SEQ ID NO: 4287 - RNA, 21 nt, synthetic construct
  source 1..21: mol_type = other RNA
gtggcctggacaagcagttgg

SEQ ID NO: 4288 - RNA, 21 nt, synthetic construct
  source 1..21: mol_type = other RNA
gtggctggtggaggagcaggc

SEQ ID NO: 4289 - RNA, 21 nt, synthetic construct
  source 1..21: mol_type = other RNA
gtgggagcaggatcggggctg

SEQ ID NO: 4290 - RNA, 21 nt, synthetic construct
  source 1..21: mol_type = other RNA
gtgggcagattgccccgtaca

SEQ ID NO: 4291 - RNA, 21 nt, synthetic construct
  source 1..21: mol_type = other RNA
gtggggccacgagtggttttc

SEQ ID NO: 4292 - RNA, 21 nt, synthetic construct
  source 1..21: mol_type = other RNA
gtggtcagccttgtgcagcac

SEQ ID NO: 4293 - RNA, 21 nt, synthetic construct
  source 1..21: mol_type = other RNA
gtggttttcactgacagcgtg

SEQ ID NO: 4294 - RNA, 21 nt, synthetic construct
  source 1..21: mol_type = other RNA
gtgtacagcagtggctggtgg

SEQ ID NO: 4295 - RNA, 21 nt, synthetic construct
  source 1..21: mol_type = other RNA
gtgttgcaggctgcgggcact

SEQ ID NO: 4296 - RNA, 21 nt, synthetic construct
  source 1..21: mol_type = other RNA
gtgttgtcgggcctcgctggc

SEQ ID NO: 4297 - RNA, 21 nt, synthetic construct
  source 1..21: mol_type = other RNA
gttcacgctgtcagtgaaaac

SEQ ID NO: 4298 - RNA, 21 nt, synthetic construct
  source 1..21: mol_type = other RNA
gttccattacggccagcgagg

SEQ ID NO: 4299 - RNA, 21 nt, synthetic construct
  source 1..21: mol_type = other RNA
gttcttagtacgtgacagcac

SEQ ID NO: 4300 - RNA, 21 nt, synthetic construct
  source 1..21: mol_type = other RNA
gttgatgacaaggcggcacag

SEQ ID NO: 4301 - RNA, 21 nt, synthetic construct
  source 1..21: mol_type = other RNA
gttgcaggctgcgggcactgc

SEQ ID NO: 4302 - RNA, 21 nt, synthetic construct
  source 1..21: mol_type = other RNA
gttggagtccagacggaagct

SEQ ID NO: 4303 - RNA, 21 nt, synthetic construct
  source 1..21: mol_type = other RNA
gttgtcgggcctcgctggccg

SEQ ID NO: 4304 - RNA, 21 nt, synthetic construct
  source 1..21: mol_type = other RNA
gttttaggtgtacagcagtgg

SEQ ID NO: 4305 - RNA, 21 nt, synthetic construct
  source 1..21: mol_type = other RNA
gttttcactgacagcgtgaac

SEQ ID NO: 4306 - RNA, 21 nt, synthetic construct
  source 1..21: mol_type = other RNA
taaaactggtgcagccctttg

SEQ ID NO: 4307 - RNA, 21 nt, synthetic construct
  source 1..21: mol_type = other RNA
taagaacgtgccttctggcat

SEQ ID NO: 4308 - RNA, 21 nt, synthetic construct
  source 1..21: mol_type = other RNA
taaggaggatgcgcctagtga

SEQ ID NO: 4309 - RNA, 21 nt, synthetic construct
  source 1..21: mol_type = other RNA
taatggaaccccaataccagc

SEQ ID NO: 4310 - RNA, 21 nt, synthetic construct
  source 1..21: mol_type = other RNA
tacaaagggctgcaccagttt

SEQ ID NO: 4311 - RNA, 21 nt, synthetic construct
  source 1..21: mol_type = other RNA
tacacctaaaactggtgcagc

SEQ ID NO: 4312 - RNA, 21 nt, synthetic construct
  source 1..21: mol_type = other RNA
tacagcagtggctggtggagg

SEQ ID NO: 4313 - RNA, 21 nt, synthetic construct
  source 1..21: mol_type = other RNA
tacagtcagagctggaagggg

SEQ ID NO: 4314 - RNA, 21 nt, synthetic construct
  source 1..21: mol_type = other RNA
tacattggtggggccacgagt

SEQ ID NO: 4315 - RNA, 21 nt, synthetic construct
  source 1..21: mol_type = other RNA
taccagcctaggcaagtgcag

SEQ ID NO: 4316 - RNA, 21 nt, synthetic construct
  source 1..21: mol_type = other RNA
taccccttccagctctgactg

SEQ ID NO: 4317 - RNA, 21 nt, synthetic construct
  source 1..21: mol_type = other RNA
tacccgaagcgacagccccga

SEQ ID NO: 4318 - RNA, 21 nt, synthetic construct
  source 1..21: mol_type = other RNA
tacctccgacagtaccccttc

SEQ ID NO: 4319 - RNA, 21 nt, synthetic construct
  source 1..21: mol_type = other RNA
tacctgttcacgctgtcagtg

SEQ ID NO: 4320 - RNA, 21 nt, synthetic construct
  source 1..21: mol_type = other RNA
tacgcagaagcagtgcccgca

SEQ ID NO: 4321 - RNA, 21 nt, synthetic construct
  source 1..21: mol_type = other RNA
tacgcattgagtatgccgact

SEQ ID NO: 4322 - RNA, 21 nt, synthetic construct
  source 1..21: mol_type = other RNA
tacggccagcgaggcccgaca

SEQ ID NO: 4323 - RNA, 21 nt, synthetic construct
  source 1..21: mol_type = other RNA
tacggggcaatctgcccaccc

SEQ ID NO: 4324 - RNA, 21 nt, synthetic construct
  source 1..21: mol_type = other RNA
tacgtgacagcacgcacccca

SEQ ID NO: 4325 - RNA, 21 nt, synthetic construct
  source 1..21: mol_type = other RNA
tactaagaacgtgccttctgg

SEQ ID NO: 4326 - RNA, 21 nt, synthetic construct
  source 1..21: mol_type = other RNA
tactcaatgcgtacattggtg

SEQ ID NO: 4327 - RNA, 21 nt, synthetic construct
  source 1..21: mol_type = other RNA
tactgtcggaggtagtcggcc

SEQ ID NO: 4328 - RNA, 21 nt, synthetic construct
  source 1..21: mol_type = other RNA
tagctggggtgcgtgctgtca

SEQ ID NO: 4329 - RNA, 21 nt, synthetic construct
  source 1..21: mol_type = other RNA
taggcaagtgcagagggggcc

SEQ ID NO: 4330 - RNA, 21 nt, synthetic construct
  source 1..21: mol_type = other RNA
taggcagggccggggtgggag

SEQ ID NO: 4331 - RNA, 21 nt, synthetic construct
  source 1..21: mol_type = other RNA
taggcataggcagggccgggg

SEQ ID NO: 4332 - RNA, 21 nt, synthetic construct
  source 1..21: mol_type = other RNA
taggcgcatcctccttaggca

SEQ ID NO: 4333 - RNA, 21 nt, synthetic construct
  source 1..21: mol_type = other RNA
taggctggtattggggttcca

SEQ ID NO: 4334 - RNA, 21 nt, synthetic construct
  source 1..21: mol_type = other RNA
taggtgtacagcagtggctgg

SEQ ID NO: 4335 - RNA, 21 nt, synthetic construct
  source 1..21: mol_type = other RNA
tagtacgtgacagcacgcacc

SEQ ID NO: 4336 - RNA, 21 nt, synthetic construct
  source 1..21: mol_type = other RNA
tagtcggccatgcgccggggc

SEQ ID NO: 4337 - RNA, 21 nt, synthetic construct
  source 1..21: mol_type = other RNA
tagtgacccagcactgcctgc

SEQ ID NO: 4338 - RNA, 21 nt, synthetic construct
  source 1..21: mol_type = other RNA
tagtgctgcacaaggctgacc

SEQ ID NO: 4339 - RNA, 21 nt, synthetic construct
  source 1..21: mol_type = other RNA
tatcagcagtgcaggaggcca

SEQ ID NO: 4340 - RNA, 21 nt, synthetic construct
  source 1..21: mol_type = other RNA
tatgccgactccagcttccgt

SEQ ID NO: 4341 - RNA, 21 nt, synthetic construct
  source 1..21: mol_type = other RNA
tatgcctaaggaggatgcgcc

SEQ ID NO: 4342 - RNA, 21 nt, synthetic construct
  source 1..21: mol_type = other RNA
tatgtggcctcctgcactgct

SEQ ID NO: 4343 - RNA, 21 nt, synthetic construct
  source 1..21: mol_type = other RNA
tattggggttccattacggcc

SEQ ID NO: 4344 - RNA, 21 nt, synthetic construct
  source 1..21: mol_type = other RNA
tcaaccgtctggtggccgacg

SEQ ID NO: 4345 - RNA, 21 nt, synthetic construct
  source 1..21: mol_type = other RNA
tcaatgcgtacattggtgggg

SEQ ID NO: 4346 - RNA, 21 nt, synthetic construct
  source 1..21: mol_type = other RNA
tcacgctgtcagtgaaaacca

SEQ ID NO: 4347 - RNA, 21 nt, synthetic construct
  source 1..21: mol_type = other RNA
tcacgtactaagaacgtgcct

SEQ ID NO: 4348 - RNA, 21 nt, synthetic construct
  source 1..21: mol_type = other RNA
tcactaggcgcatcctcctta

SEQ ID NO: 4349 - RNA, 21 nt, synthetic construct
  source 1..21: mol_type = other RNA
tcactgacagcgtgaacaggt

SEQ ID NO: 4350 - RNA, 21 nt, synthetic construct
  source 1..21: mol_type = other RNA
tcagagctggaaggggtactg

SEQ ID NO: 4351 - RNA, 21 nt, synthetic construct
  source 1..21: mol_type = other RNA
tcagcagtgcaggaggccaca

SEQ ID NO: 4352 - RNA, 21 nt, synthetic construct
  source 1..21: mol_type = other RNA
tcagccttgtgcagcactatg

SEQ ID NO: 4353 - RNA, 21 nt, synthetic construct
  source 1..21: mol_type = other RNA
tcagtgaaaaccactcgtggc

SEQ ID NO: 4354 - RNA, 21 nt, synthetic construct
  source 1..21: mol_type = other RNA
tcatcaaccgtctggtggccg

SEQ ID NO: 4355 - RNA, 21 nt, synthetic construct
  source 1..21: mol_type = other RNA
tccaactgcttgtccaggcca

SEQ ID NO: 4356 - RNA, 21 nt, synthetic construct
  source 1..21: mol_type = other RNA
tccaccagccactgctgtaca

SEQ ID NO: 4357 - RNA, 21 nt, synthetic construct
  source 1..21: mol_type = other RNA
tccacgtcggccaccagacgg

SEQ ID NO: 4358 - RNA, 21 nt, synthetic construct
  source 1..21: mol_type = other RNA
tccagacggaagctggagtcg

SEQ ID NO: 4359 - RNA, 21 nt, synthetic construct
  source 1..21: mol_type = other RNA
tccagctctgactgtacgggg

SEQ ID NO: 4360 - RNA, 21 nt, synthetic construct
  source 1..21: mol_type = other RNA
tccagcttccgtctggactcc

SEQ ID NO: 4361 - RNA, 21 nt, synthetic construct
  source 1..21: mol_type = other RNA
tccaggccacgcatcctggcc

SEQ ID NO: 4362 - RNA, 21 nt, synthetic construct
  source 1..21: mol_type = other RNA
tccattacggccagcgaggcc

SEQ ID NO: 4363 - RNA, 21 nt, synthetic construct
  source 1..21: mol_type = other RNA
tcccaccccggccctgcctat

SEQ ID NO: 4364 - RNA, 21 nt, synthetic construct
  source 1..21: mol_type = other RNA
tcccttggccccctctgcact

SEQ ID NO: 4365 - RNA, 21 nt, synthetic construct
  source 1..21: mol_type = other RNA
tccgacagtaccccttccagc

SEQ ID NO: 4366 - RNA, 21 nt, synthetic construct
  source 1..21: mol_type = other RNA
tccggaaaggccaggatgcgt

SEQ ID NO: 4367 - RNA, 21 nt, synthetic construct
  source 1..21: mol_type = other RNA
tccggatgtggtcagccttgt

SEQ ID NO: 4368 - RNA, 21 nt, synthetic construct
  source 1..21: mol_type = other RNA
tccgtctggactccaactgct

SEQ ID NO: 4369 - RNA, 21 nt, synthetic construct
  source 1..21: mol_type = other RNA
tcctccaccagccactgctgt

SEQ ID NO: 4370 - RNA, 21 nt, synthetic construct
  source 1..21: mol_type = other RNA
tcctccttaggcataggcagg

SEQ ID NO: 4371 - RNA, 21 nt, synthetic construct
  source 1..21: mol_type = other RNA
tcctgcactgctgatacccga

SEQ ID NO: 4372 - RNA, 21 nt, synthetic construct
  source 1..21: mol_type = other RNA
tcctgctcccaccccggccct

SEQ ID NO: 4373 - RNA, 21 nt, synthetic construct
  source 1..21: mol_type = other RNA
tcctggcctttccggatgtgg

SEQ ID NO: 4374 - RNA, 21 nt, synthetic construct
  source 1..21: mol_type = other RNA
tccttaggcataggcagggcc

SEQ ID NO: 4375 - RNA, 21 nt, synthetic construct
  source 1..21: mol_type = other RNA
tcgctggccgtaatggaaccc

SEQ ID NO: 4376 - RNA, 21 nt, synthetic construct
  source 1..21: mol_type = other RNA
tcgcttcgggtatcagcagtg

SEQ ID NO: 4377 - RNA, 21 nt, synthetic construct
  source 1..21: mol_type = other RNA
tcggaggtagtcggccatgcg

SEQ ID NO: 4378 - RNA, 21 nt, synthetic construct
  source 1..21: mol_type = other RNA
tcggcatactcaatgcgtaca

SEQ ID NO: 4379 - RNA, 21 nt, synthetic construct
  source 1..21: mol_type = other RNA
tcggccaccagacggttgatg

SEQ ID NO: 4380 - RNA, 21 nt, synthetic construct
  source 1..21: mol_type = other RNA
tcggccatgcgccggggcagt

SEQ ID NO: 4381 - RNA, 21 nt, synthetic construct
  source 1..21: mol_type = other RNA
tcgggcctcgctggccgtaat

SEQ ID NO: 4382 - RNA, 21 nt, synthetic construct
  source 1..21: mol_type = other RNA
tcggggctgtcgcttcgggta

SEQ ID NO: 4383 - RNA, 21 nt, synthetic construct
  source 1..21: mol_type = other RNA
tcgggtatcagcagtgcagga

SEQ ID NO: 4384 - RNA, 21 nt, synthetic construct
  source 1..21: mol_type = other RNA
tcgtggccccaccaatgtacg

SEQ ID NO: 4385 - RNA, 21 nt, synthetic construct
  source 1..21: mol_type = other RNA
tctgactgtacggggcaatct

SEQ ID NO: 4386 - RNA, 21 nt, synthetic construct
  source 1..21: mol_type = other RNA
tctgcacttgcctaggctggt

SEQ ID NO: 4387 - RNA, 21 nt, synthetic construct
  source 1..21: mol_type = other RNA
tctgcaggtgttgtcgggcct

SEQ ID NO: 4388 - RNA, 21 nt, synthetic construct
  source 1..21: mol_type = other RNA
tctgcgtacaaagggctgcac

SEQ ID NO: 4389 - RNA, 21 nt, synthetic construct
  source 1..21: mol_type = other RNA
tctggactccaactgcttgtc

SEQ ID NO: 4390 - RNA, 21 nt, synthetic construct
  source 1..21: mol_type = other RNA
tctggcatcttctgcaggtgt

SEQ ID NO: 4391 - RNA, 21 nt, synthetic construct
  source 1..21: mol_type = other RNA
tctggtggccgacgtggactg

SEQ ID NO: 4392 - RNA, 21 nt, synthetic construct
  source 1..21: mol_type = other RNA
tcttagtacgtgacagcacgc

SEQ ID NO: 4393 - RNA, 21 nt, synthetic construct
  source 1..21: mol_type = other RNA
tcttctgcaggtgttgtcggg

SEQ ID NO: 4394 - RNA, 21 nt, synthetic construct
  source 1..21: mol_type = other RNA
tgaaaaccactcgtggcccca

SEQ ID NO: 4395 - RNA, 21 nt, synthetic construct
  source 1..21: mol_type = other RNA
tgaacaggtagctggggtgcg

SEQ ID NO: 4396 - RNA, 21 nt, synthetic construct
  source 1..21: mol_type = other RNA
tgacaaggcggcacaggtgtt

SEQ ID NO: 4397 - RNA, 21 nt, synthetic construct
  source 1..21: mol_type = other RNA
tgacagcacgcaccccagcta

SEQ ID NO: 4398 - RNA, 21 nt, synthetic construct
  source 1..21: mol_type = other RNA
tgacagcgtgaacaggtagct

SEQ ID NO: 4399 - RNA, 21 nt, synthetic construct
  source 1..21: mol_type = other RNA
tgaccacatccggaaaggcca

SEQ ID NO: 4400 - RNA, 21 nt, synthetic construct
  source 1..21: mol_type = other RNA
tgacccagcactgcctgctcc

SEQ ID NO: 4401 - RNA, 21 nt, synthetic construct
  source 1..21: mol_type = other RNA
tgactgtacggggcaatctgc

SEQ ID NO: 4402 - RNA, 21 nt, synthetic construct
  source 1..21: mol_type = other RNA
tgagggtgggcagattgcccc

SEQ ID NO: 4403 - RNA, 21 nt, synthetic construct
  source 1..21: mol_type = other RNA
tgagtatgccgactccagctt

SEQ ID NO: 4404 - RNA, 21 nt, synthetic construct
  source 1..21: mol_type = other RNA
tgatacccgaagcgacagccc

SEQ ID NO: 4405 - RNA, 21 nt, synthetic construct
  source 1..21: mol_type = other RNA
tgatgacaaggcggcacaggt

SEQ ID NO: 4406 - RNA, 21 nt, synthetic construct
  source 1..21: mol_type = other RNA
tgcaacacctgtgccgccttg

SEQ ID NO: 4407 - RNA, 21 nt, synthetic construct
  source 1..21: mol_type = other RNA
tgcacaaggctgaccacatcc

SEQ ID NO: 4408 - RNA, 21 nt, synthetic construct
  source 1..21: mol_type = other RNA
tgcaccagttttaggtgtaca

SEQ ID NO: 4409 - RNA, 21 nt, synthetic construct
  source 1..21: mol_type = other RNA
tgcactgctgatacccgaagc

SEQ ID NO: 4410 - RNA, 21 nt, synthetic construct
  source 1..21: mol_type = other RNA
tgcacttgcctaggctggtat

SEQ ID NO: 4411 - RNA, 21 nt, synthetic construct
  source 1..21: mol_type = other RNA
tgcagaagatgccagaaggca

SEQ ID NO: 4412 - RNA, 21 nt, synthetic construct
  source 1..21: mol_type = other RNA
tgcagcactatgtggcctcct

SEQ ID NO: 4413 - RNA, 21 nt, synthetic construct
  source 1..21: mol_type = other RNA
tgcagccctttgtacgcagaa

SEQ ID NO: 4414 - RNA, 21 nt, synthetic construct
  source 1..21: mol_type = other RNA
tgcaggaggccacatagtgct

SEQ ID NO: 4415 - RNA, 21 nt, synthetic construct
  source 1..21: mol_type = other RNA
tgcaggctgcgggcactgctt

SEQ ID NO: 4416 - RNA, 21 nt, synthetic construct
  source 1..21: mol_type = other RNA
tgcaggtgttgtcgggcctcg

SEQ ID NO: 4417 - RNA, 21 nt, synthetic construct
  source 1..21: mol_type = other RNA
tgccactgccccggcgcatgg

SEQ ID NO: 4418 - RNA, 21 nt, synthetic construct
  source 1..21: mol_type = other RNA
tgccagaaggcacgttcttag

SEQ ID NO: 4419 - RNA, 21 nt, synthetic construct
  source 1..21: mol_type = other RNA
tgccccggcgcatggccgact

SEQ ID NO: 4420 - RNA, 21 nt, synthetic construct
  source 1..21: mol_type = other RNA
tgccccgtacagtcagagctg

SEQ ID NO: 4421 - RNA, 21 nt, synthetic construct
  source 1..21: mol_type = other RNA
tgcccgcagcctgcaacacct

SEQ ID NO: 4422 - RNA, 21 nt, synthetic construct
  source 1..21: mol_type = other RNA
tgccgactccagcttccgtct

SEQ ID NO: 4423 - RNA, 21 nt, synthetic construct
  source 1..21: mol_type = other RNA
tgccgccttgtcatcaaccgt

SEQ ID NO: 4424 - RNA, 21 nt, synthetic construct
  source 1..21: mol_type = other RNA
tgcctaaggaggatgcgccta

SEQ ID NO: 4425 - RNA, 21 nt, synthetic construct
  source 1..21: mol_type = other RNA
tgcctaggctggtattggggt

SEQ ID NO: 4426 - RNA, 21 nt, synthetic construct
  source 1..21: mol_type = other RNA
tgcctatgcctaaggaggatg

SEQ ID NO: 4427 - RNA, 21 nt, synthetic construct
  source 1..21: mol_type = other RNA
tgcctgctcctccaccagcca

SEQ ID NO: 4428 - RNA, 21 nt, synthetic construct
  source 1..21: mol_type = other RNA
tgccttctggcatcttctgca

SEQ ID NO: 4429 - RNA, 21 nt, synthetic construct
  source 1..21: mol_type = other RNA
tgcgcctagtgacccagcact

SEQ ID NO: 4430 - RNA, 21 nt, synthetic construct
  source 1..21: mol_type = other RNA
tgcgggcactgcttctgcgta

SEQ ID NO: 4431 - RNA, 21 nt, synthetic construct
  source 1..21: mol_type = other RNA
tgcgtacaaagggctgcacca

SEQ ID NO: 4432 - RNA, 21 nt, synthetic construct
  source 1..21: mol_type = other RNA
tgcgtacattggtggggccac

SEQ ID NO: 4433 - RNA, 21 nt, synthetic construct
  source 1..21: mol_type = other RNA
tgcgtgctgtcacgtactaag

SEQ ID NO: 4434 - RNA, 21 nt, synthetic construct
  source 1..21: mol_type = other RNA
tgcgtggcctggacaagcagt

SEQ ID NO: 4435 - RNA, 21 nt, synthetic construct
  source 1..21: mol_type = other RNA
tgctcctccaccagccactgc

SEQ ID NO: 4436 - RNA, 21 nt, synthetic construct
  source 1..21: mol_type = other RNA
tgctgatacccgaagcgacag

SEQ ID NO: 4437 - RNA, 21 nt, synthetic construct
  source 1..21: mol_type = other RNA
tgctgcacaaggctgaccaca

SEQ ID NO: 4438 - RNA, 21 nt, synthetic construct
  source 1..21: mol_type = other RNA
tgctgggtcactaggcgcatc

SEQ ID NO: 4439 - RNA, 21 nt, synthetic construct
  source 1..21: mol_type = other RNA
tgctgtacacctaaaactggt

SEQ ID NO: 4440 - RNA, 21 nt, synthetic construct
  source 1..21: mol_type = other RNA
tgctgtcacgtactaagaacg

SEQ ID NO: 4441 - RNA, 21 nt, synthetic construct
  source 1..21: mol_type = other RNA
tgcttctgcgtacaaagggct

SEQ ID NO: 4442 - RNA, 21 nt, synthetic construct
  source 1..21: mol_type = other RNA
tgcttgtccaggccacgcatc

SEQ ID NO: 4443 - RNA, 21 nt, synthetic construct
  source 1..21: mol_type = other RNA
tggaaccccaataccagccta

SEQ ID NO: 4444 - RNA, 21 nt, synthetic construct
  source 1..21: mol_type = other RNA
tggaaggggtactgtcggagg

SEQ ID NO: 4445 - RNA, 21 nt, synthetic construct
  source 1..21: mol_type = other RNA
tggacaagcagttggagtcca

SEQ ID NO: 4446 - RNA, 21 nt, synthetic construct
  source 1..21: mol_type = other RNA
tggactccaactgcttgtcca

SEQ ID NO: 4447 - RNA, 21 nt, synthetic construct
  source 1..21: mol_type = other RNA
tggactgcctgccactgcccc

SEQ ID NO: 4448 - RNA, 21 nt, synthetic construct
  source 1..21: mol_type = other RNA
tggaggagcaggcagtgctgg

SEQ ID NO: 4449 - RNA, 21 nt, synthetic construct
  source 1..21: mol_type = other RNA
tggagtccagacggaagctgg

SEQ ID NO: 4450 - RNA, 21 nt, synthetic construct
  source 1..21: mol_type = other RNA
tggagtcggcatactcaatgc

SEQ ID NO: 4451 - RNA, 21 nt, synthetic construct
  source 1..21: mol_type = other RNA
tggcaggcagtccacgtcggc

SEQ ID NO: 4452 - RNA, 21 nt, synthetic construct
  source 1..21: mol_type = other RNA
tggcatcttctgcaggtgttg

SEQ ID NO: 4453 - RNA, 21 nt, synthetic construct
  source 1..21: mol_type = other RNA
tggccccaccaatgtacgcat

SEQ ID NO: 4454 - RNA, 21 nt, synthetic construct
  source 1..21: mol_type = other RNA
tggccccctctgcacttgcct

SEQ ID NO: 4455 - RNA, 21 nt, synthetic construct
  source 1..21: mol_type = other RNA
tggccgacgtggactgcctgc

SEQ ID NO: 4456 - RNA, 21 nt, synthetic construct
  source 1..21: mol_type = other RNA
tggccgactacctccgacagt

SEQ ID NO: 4457 - RNA, 21 nt, synthetic construct
  source 1..21: mol_type = other RNA
tggccgtaatggaaccccaat

SEQ ID NO: 4458 - RNA, 21 nt, synthetic construct
  source 1..21: mol_type = other RNA
tggcctcctgcactgctgata

SEQ ID NO: 4459 - RNA, 21 nt, synthetic construct
  source 1..21: mol_type = other RNA
tggcctggacaagcagttgga

SEQ ID NO: 4460 - RNA, 21 nt, synthetic construct
  source 1..21: mol_type = other RNA
tggcctttccggatgtggtca

SEQ ID NO: 4461 - RNA, 21 nt, synthetic construct
  source 1..21: mol_type = other RNA
tggctggtggaggagcaggca

SEQ ID NO: 4462 - RNA, 21 nt, synthetic construct
  source 1..21: mol_type = other RNA
tgggagcaggatcggggctgt

SEQ ID NO: 4463 - RNA, 21 nt, synthetic construct
  source 1..21: mol_type = other RNA
tgggcagattgccccgtacag

SEQ ID NO: 4464 - RNA, 21 nt, synthetic construct
  source 1..21: mol_type = other RNA
tggggccacgagtggttttca

SEQ ID NO: 4465 - RNA, 21 nt, synthetic construct
  source 1..21: mol_type = other RNA
tggggtgcgtgctgtcacgta

SEQ ID NO: 4466 - RNA, 21 nt, synthetic construct
  source 1..21: mol_type = other RNA
tggggttccattacggccagc

SEQ ID NO: 4467 - RNA, 21 nt, synthetic construct
  source 1..21: mol_type = other RNA
tgggtcactaggcgcatcctc

SEQ ID NO: 4468 - RNA, 21 nt, synthetic construct
  source 1..21: mol_type = other RNA
tgggtgagggtgggcagattg

SEQ ID NO: 4469 - RNA, 21 nt, synthetic construct
  source 1..21: mol_type = other RNA
tggtattggggttccattacg

SEQ ID NO: 4470 - RNA, 21 nt, synthetic construct
  source 1..21: mol_type = other RNA
tggtcagccttgtgcagcact

SEQ ID NO: 4471 - RNA, 21 nt, synthetic construct
  source 1..21: mol_type = other RNA
tggtgcagccctttgtacgca

SEQ ID NO: 4472 - RNA, 21 nt, synthetic construct
  source 1..21: mol_type = other RNA
tggtggaggagcaggcagtgc

SEQ ID NO: 4473 - RNA, 21 nt, synthetic construct
  source 1..21: mol_type = other RNA
tggtggccgacgtggactgcc

SEQ ID NO: 4474 - RNA, 21 nt, synthetic construct
  source 1..21: mol_type = other RNA
tggtggggccacgagtggttt

SEQ ID NO: 4475 - RNA, 21 nt, synthetic construct
  source 1..21: mol_type = other RNA
tggttttcactgacagcgtga

SEQ ID NO: 4476 - RNA, 21 nt, synthetic construct
  source 1..21: mol_type = other RNA
tgtacacctaaaactggtgca

SEQ ID NO: 4477 - RNA, 21 nt, synthetic construct
  source 1..21: mol_type = other RNA
tgtacagcagtggctggtgga

SEQ ID NO: 4478 - RNA, 21 nt, synthetic construct
  source 1..21: mol_type = other RNA
tgtacgcagaagcagtgcccg

SEQ ID NO: 4479 - RNA, 21 nt, synthetic construct
  source 1..21: mol_type = other RNA
tgtacgcattgagtatgccga

SEQ ID NO: 4480 - RNA, 21 nt, synthetic construct
  source 1..21: mol_type = other RNA
tgtacggggcaatctgcccac

SEQ ID NO: 4481 - RNA, 21 nt, synthetic construct
  source 1..21: mol_type = other RNA
tgtcacgtactaagaacgtgc

SEQ ID NO: 4482 - RNA, 21 nt, synthetic construct
  source 1..21: mol_type = other RNA
tgtcagtgaaaaccactcgtg

SEQ ID NO: 4483 - RNA, 21 nt, synthetic construct
  source 1..21: mol_type = other RNA
tgtcatcaaccgtctggtggc

SEQ ID NO: 4484 - RNA, 21 nt, synthetic construct
  source 1..21: mol_type = other RNA
tgtccaggccacgcatcctgg

SEQ ID NO: 4485 - RNA, 21 nt, synthetic construct
  source 1..21: mol_type = other RNA
tgtcccttggccccctctgca

SEQ ID NO: 4486 - RNA, 21 nt, synthetic construct
  source 1..21: mol_type = other RNA
tgtcgcttcgggtatcagcag

SEQ ID NO: 4487 - RNA, 21 nt, synthetic construct
  source 1..21: mol_type = other RNA
tgtcggaggtagtcggccatg

SEQ ID NO: 4488 - RNA, 21 nt, synthetic construct
  source 1..21: mol_type = other RNA
tgtcgggcctcgctggccgta

SEQ ID NO: 4489 - RNA, 21 nt, synthetic construct
  source 1..21: mol_type = other RNA
tgtgcagcactatgtggcctc

SEQ ID NO: 4490 - RNA, 21 nt, synthetic construct
  source 1..21: mol_type = other RNA
tgtgccgccttgtcatcaacc

SEQ ID NO: 4491 - RNA, 21 nt, synthetic construct
  source 1..21: mol_type = other RNA
tgtggcctcctgcactgctga

SEQ ID NO: 4492 - RNA, 21 nt, synthetic construct
  source 1..21: mol_type = other RNA
tgtggtcagccttgtgcagca

SEQ ID NO: 4493 - RNA, 21 nt, synthetic construct
  source 1..21: mol_type = other RNA
tgttcacgctgtcagtgaaaa

SEQ ID NO: 4494 - RNA, 21 nt, synthetic construct
  source 1..21: mol_type = other RNA
tgttgcaggctgcgggcactg

SEQ ID NO: 4495 - RNA, 21 nt, synthetic construct
  source 1..21: mol_type = other RNA
tgttgtcgggcctcgctggcc

SEQ ID NO: 4496 - RNA, 21 nt, synthetic construct
  source 1..21: mol_type = other RNA
ttacggccagcgaggcccgac

SEQ ID NO: 4497 - RNA, 21 nt, synthetic construct
  source 1..21: mol_type = other RNA
ttaggcataggcagggccggg

SEQ ID NO: 4498 - RNA, 21 nt, synthetic construct
  source 1..21: mol_type = other RNA
ttaggtgtacagcagtggctg

SEQ ID NO: 4499 - RNA, 21 nt, synthetic construct
  source 1..21: mol_type = other RNA
ttagtacgtgacagcacgcac

SEQ ID NO: 4500 - RNA, 21 nt, synthetic construct
  source 1..21: mol_type = other RNA
ttcacgctgtcagtgaaaacc

SEQ ID NO: 4501 - RNA, 21 nt, synthetic construct
  source 1..21: mol_type = other RNA
ttcactgacagcgtgaacagg

SEQ ID NO: 4502 - RNA, 21 nt, synthetic construct
  source 1..21: mol_type = other RNA
ttccagctctgactgtacggg

SEQ ID NO: 4503 - RNA, 21 nt, synthetic construct
  source 1..21: mol_type = other RNA
ttccattacggccagcgaggc

SEQ ID NO: 4504 - RNA, 21 nt, synthetic construct
  source 1..21: mol_type = other RNA
ttccggatgtggtcagccttg

SEQ ID NO: 4505 - RNA, 21 nt, synthetic construct
  source 1..21: mol_type = other RNA
ttccgtctggactccaactgc

SEQ ID NO: 4506 - RNA, 21 nt, synthetic construct
  source 1..21: mol_type = other RNA
ttcgggtatcagcagtgcagg

SEQ ID NO: 4507 - RNA, 21 nt, synthetic construct
  source 1..21: mol_type = other RNA
ttctgcaggtgttgtcgggcc

SEQ ID NO: 4508 - RNA, 21 nt, synthetic construct
  source 1..21: mol_type = other RNA
ttctgcgtacaaagggctgca

SEQ ID NO: 4509 - RNA, 21 nt, synthetic construct
  source 1..21: mol_type = other RNA
ttctggcatcttctgcaggtg

SEQ ID NO: 4510 - RNA, 21 nt, synthetic construct
  source 1..21: mol_type = other RNA
ttcttagtacgtgacagcacg

SEQ ID NO: 4511 - RNA, 21 nt, synthetic construct
  source 1..21: mol_type = other RNA
ttgagtatgccgactccagct

SEQ ID NO: 4512 - RNA, 21 nt, synthetic construct
  source 1..21: mol_type = other RNA
ttgatgacaaggcggcacagg

SEQ ID NO: 4513 - RNA, 21 nt, synthetic construct
  source 1..21: mol_type = other RNA
ttgcaggctgcgggcactgct

SEQ ID NO: 4514 - RNA, 21 nt, synthetic construct
  source 1..21: mol_type = other RNA
ttgccccgtacagtcagagct

SEQ ID NO: 4515 - RNA, 21 nt, synthetic construct
  source 1..21: mol_type = other RNA
ttgcctaggctggtattgggg

SEQ ID NO: 4516 - RNA, 21 nt, synthetic construct
  source 1..21: mol_type = other RNA
ttggagtccagacggaagctg

SEQ ID NO: 4517 - RNA, 21 nt, synthetic construct
  source 1..21: mol_type = other RNA
ttggccccctctgcacttgcc

SEQ ID NO: 4518 - RNA, 21 nt, synthetic construct
  source 1..21: mol_type = other RNA
ttggggttccattacggccag

SEQ ID NO: 4519 - RNA, 21 nt, synthetic construct
  source 1..21: mol_type = other RNA
ttggtggggccacgagtggtt

SEQ ID NO: 4520 - RNA, 21 nt, synthetic construct
  source 1..21: mol_type = other RNA
ttgtacgcagaagcagtgccc

SEQ ID NO: 4521 - RNA, 21 nt, synthetic construct
  source 1..21: mol_type = other RNA
ttgtcatcaaccgtctggtgg

SEQ ID NO: 4522 - RNA, 21 nt, synthetic construct
  source 1..21: mol_type = other RNA
ttgtccaggccacgcatcctg

SEQ ID NO: 4523 - RNA, 21 nt, synthetic construct
  source 1..21: mol_type = other RNA
ttgtcgggcctcgctggccgt

SEQ ID NO: 4524 - RNA, 21 nt, synthetic construct
  source 1..21: mol_type = other RNA
ttgtgcagcactatgtggcct

SEQ ID NO: 4525 - RNA, 21 nt, synthetic construct
  source 1..21: mol_type = other RNA
tttaggtgtacagcagtggct

SEQ ID NO: 4526 - RNA, 21 nt, synthetic construct
  source 1..21: mol_type = other RNA
tttcactgacagcgtgaacag

SEQ ID NO: 4527 - RNA, 21 nt, synthetic construct
  source 1..21: mol_type = other RNA
tttccggatgtggtcagcctt

SEQ ID NO: 4528 - RNA, 21 nt, synthetic construct
  source 1..21: mol_type = other RNA
tttgtacgcagaagcagtgcc

SEQ ID NO: 4529 - RNA, 21 nt, synthetic construct
  source 1..21: mol_type = other RNA
ttttaggtgtacagcagtggc

SEQ ID NO: 4530 - RNA, 21 nt, synthetic construct
  source 1..21: mol_type = other RNA
ttttcactgacagcgtgaaca

SEQ ID NO: 4531 - RNA, 22 nt, synthetic construct
  source 1..22: mol_type = other RNA
aaaaccactcgtggccccacca

SEQ ID NO: 4532 - RNA, 22 nt, synthetic construct
  source 1..22: mol_type = other RNA
aaaactggtgcagccctttgta

SEQ ID NO: 4533 - RNA, 22 nt, synthetic construct
  source 1..22: mol_type = other RNA
aaaccactcgtggccccaccaa

SEQ ID NO: 4534 - RNA, 22 nt, synthetic construct
  source 1..22: mol_type = other RNA
aaactggtgcagccctttgtac

SEQ ID NO: 4535 - RNA, 22 nt, synthetic construct
  source 1..22: mol_type = other RNA
aaaggccaggatgcgtggcctg

SEQ ID NO: 4536 - RNA, 22 nt, synthetic construct
  source 1..22: mol_type = other RNA
aaagggctgcaccagttttagg

SEQ ID NO: 4537 - RNA, 22 nt, synthetic construct
  source 1..22: mol_type = other RNA
aacacctgcagaagatgccaga

SEQ ID NO: 4538 - RNA, 22 nt, synthetic construct
  source 1..22: mol_type = other RNA
aacacctgtgccgccttgtcat

SEQ ID NO: 4539 - RNA, 22 nt, synthetic construct
  source 1..22: mol_type = other RNA
aacaggtagctggggtgcgtgc

SEQ ID NO: 4540 - RNA, 22 nt, synthetic construct
  source 1..22: mol_type = other RNA
aaccactcgtggccccaccaat

SEQ ID NO: 4541 - RNA, 22 nt, synthetic construct
  source 1..22: mol_type = other RNA
aaccccaataccagcctaggca

SEQ ID NO: 4542 - RNA, 22 nt, synthetic construct
  source 1..22: mol_type = other RNA
aaccgtctggtggccgacgtgg

SEQ ID NO: 4543 - RNA, 22 nt, synthetic construct
  source 1..22: mol_type = other RNA
aacgtgccttctggcatcttct

SEQ ID NO: 4544 - RNA, 22 nt, synthetic construct
  source 1..22: mol_type = other RNA
aactgcttgtccaggccacgca

SEQ ID NO: 4545 - RNA, 22 nt, synthetic construct
  source 1..22: mol_type = other RNA
aactggtgcagccctttgtacg

SEQ ID NO: 4546 - RNA, 22 nt, synthetic construct
  source 1..22: mol_type = other RNA
aagaacgtgccttctggcatct

SEQ ID NO: 4547 - RNA, 22 nt, synthetic construct
  source 1..22: mol_type = other RNA
aagatgccagaaggcacgttct

SEQ ID NO: 4548 - RNA, 22 nt, synthetic construct
  source 1..22: mol_type = other RNA
aagcagtgcccgcagcctgcaa

SEQ ID NO: 4549 - RNA, 22 nt, synthetic construct
  source 1..22: mol_type = other RNA
aagcagttggagtccagacgga

SEQ ID NO: 4550 - RNA, 22 nt, synthetic construct
  source 1..22: mol_type = other RNA
aagcgacagccccgatcctgct

SEQ ID NO: 4551 - RNA, 22 nt, synthetic construct
  source 1..22: mol_type = other RNA
aagctggagtcggcatactcaa

SEQ ID NO: 4552 - RNA, 22 nt, synthetic construct
  source 1..22: mol_type = other RNA
aaggaggatgcgcctagtgacc

SEQ ID NO: 4553 - RNA, 22 nt, synthetic construct
  source 1..22: mol_type = other RNA
aaggcacgttcttagtacgtga

SEQ ID NO: 4554 - RNA, 22 nt, synthetic construct
  source 1..22: mol_type = other RNA
aaggccaggatgcgtggcctgg

SEQ ID NO: 4555 - RNA, 22 nt, synthetic construct
  source 1..22: mol_type = other RNA
aaggcggcacaggtgttgcagg

SEQ ID NO: 4556 - RNA, 22 nt, synthetic construct
  source 1..22: mol_type = other RNA
aaggctgaccacatccggaaag

SEQ ID NO: 4557 - RNA, 22 nt, synthetic construct
  source 1..22: mol_type = other RNA
aagggctgcaccagttttaggt

SEQ ID NO: 4558 - RNA, 22 nt, synthetic construct
  source 1..22: mol_type = other RNA
aaggggtactgtcggaggtagt

SEQ ID NO: 4559 - RNA, 22 nt, synthetic construct
  source 1..22: mol_type = other RNA
aataccagcctaggcaagtgca

SEQ ID NO: 4560 - RNA, 22 nt, synthetic construct
  source 1..22: mol_type = other RNA
aatgcgtacattggtggggcca

SEQ ID NO: 4561 - RNA, 22 nt, synthetic construct
  source 1..22: mol_type = other RNA
aatggaaccccaataccagcct

SEQ ID NO: 4562 - RNA, 22 nt, synthetic construct
  source 1..22: mol_type = other RNA
aatgtacgcattgagtatgccg

SEQ ID NO: 4563 - RNA, 22 nt, synthetic construct
  source 1..22: mol_type = other RNA
acaaagggctgcaccagtttta

SEQ ID NO: 4564 - RNA, 22 nt, synthetic construct
  source 1..22: mol_type = other RNA
acaacacctgcagaagatgcca

SEQ ID NO: 4565 - RNA, 22 nt, synthetic construct
  source 1..22: mol_type = other RNA
acaagcagttggagtccagacg

SEQ ID NO: 4566 - RNA, 22 nt, synthetic construct
  source 1..22: mol_type = other RNA
acaaggcggcacaggtgttgca

SEQ ID NO: 4567 - RNA, 22 nt, synthetic construct
  source 1..22: mol_type = other RNA
acaaggctgaccacatccggaa

SEQ ID NO: 4568 - RNA, 22 nt, synthetic construct
  source 1..22: mol_type = other RNA
acacctaaaactggtgcagccc

SEQ ID NO: 4569 - RNA, 22 nt, synthetic construct
  source 1..22: mol_type = other RNA
acacctgcagaagatgccagaa

SEQ ID NO: 4570 - RNA, 22 nt, synthetic construct
  source 1..22: mol_type = other RNA
acacctgtgccgccttgtcatc

SEQ ID NO: 4571 - RNA, 22 nt, synthetic construct
  source 1..22: mol_type = other RNA
acagcacgcaccccagctacct

SEQ ID NO: 4572 - RNA, 22 nt, synthetic construct
  source 1..22: mol_type = other RNA
acagcagtggctggtggaggag

SEQ ID NO: 4573 - RNA, 22 nt, synthetic construct
  source 1..22: mol_type = other RNA
acagccccgatcctgctcccac

SEQ ID NO: 4574 - RNA, 22 nt, synthetic construct
  source 1..22: mol_type = other RNA
acagcgtgaacaggtagctggg

SEQ ID NO: 4575 - RNA, 22 nt, synthetic construct
  source 1..22: mol_type = other RNA
acaggtagctggggtgcgtgct

SEQ ID NO: 4576 - RNA, 22 nt, synthetic construct
  source 1..22: mol_type = other RNA
acaggtgttgcaggctgcgggc

SEQ ID NO: 4577 - RNA, 22 nt, synthetic construct
  source 1..22: mol_type = other RNA
acagtaccccttccagctctga

SEQ ID NO: 4578 - RNA, 22 nt, synthetic construct
  source 1..22: mol_type = other RNA
acagtcagagctggaaggggta

SEQ ID NO: 4579 - RNA, 22 nt, synthetic construct
  source 1..22: mol_type = other RNA
acatagtgctgcacaaggctga

SEQ ID NO: 4580 - RNA, 22 nt, synthetic construct
  source 1..22: mol_type = other RNA
acatccggaaaggccaggatgc

SEQ ID NO: 4581 - RNA, 22 nt, synthetic construct
  source 1..22: mol_type = other RNA
acattggtggggccacgagtgg

SEQ ID NO: 4582 - RNA, 22 nt, synthetic construct
  source 1..22: mol_type = other RNA
accaatgtacgcattgagtatg

SEQ ID NO: 4583 - RNA, 22 nt, synthetic construct
  source 1..22: mol_type = other RNA
accacatccggaaaggccagga

SEQ ID NO: 4584 - RNA, 22 nt, synthetic construct
  source 1..22: mol_type = other RNA
accactcgtggccccaccaatg

SEQ ID NO: 4585 - RNA, 22 nt, synthetic construct
  source 1..22: mol_type = other RNA
accagacggttgatgacaaggc

SEQ ID NO: 4586 - RNA, 22 nt, synthetic construct
  source 1..22: mol_type = other RNA
accagccactgctgtacaccta

SEQ ID NO: 4587 - RNA, 22 nt, synthetic construct
  source 1..22: mol_type = other RNA
accagcctaggcaagtgcagag

SEQ ID NO: 4588 - RNA, 22 nt, synthetic construct
  source 1..22: mol_type = other RNA
accagttttaggtgtacagcag

SEQ ID NO: 4589 - RNA, 22 nt, synthetic construct
  source 1..22: mol_type = other RNA
acccagcactgcctgctcctcc

SEQ ID NO: 4590 - RNA, 22 nt, synthetic construct
  source 1..22: mol_type = other RNA
accccaataccagcctaggcaa

SEQ ID NO: 4591 - RNA, 22 nt, synthetic construct
  source 1..22: mol_type = other RNA
accccagctacctgttcacgct

SEQ ID NO: 4592 - RNA, 22 nt, synthetic construct
  source 1..22: mol_type = other RNA
accccggccctgcctatgccta

SEQ ID NO: 4593 - RNA, 22 nt, synthetic construct
  source 1..22: mol_type = other RNA
accccttccagctctgactgta

SEQ ID NO: 4594 - RNA, 22 nt, synthetic construct
  source 1..22: mol_type = other RNA
acccgaagcgacagccccgatc

SEQ ID NO: 4595 - RNA, 22 nt, synthetic construct
  source 1..22: mol_type = other RNA
accgtctggtggccgacgtgga

SEQ ID NO: 4596 - RNA, 22 nt, synthetic construct
  source 1..22: mol_type = other RNA
acctaaaactggtgcagccctt

SEQ ID NO: 4597 - RNA, 22 nt, synthetic construct
  source 1..22: mol_type = other RNA
acctccgacagtaccccttcca

SEQ ID NO: 4598 - RNA, 22 nt, synthetic construct
  source 1..22: mol_type = other RNA
acctgcagaagatgccagaagg

SEQ ID NO: 4599 - RNA, 22 nt, synthetic construct
  source 1..22: mol_type = other RNA
acctgtgccgccttgtcatcaa

SEQ ID NO: 4600 - RNA, 22 nt, synthetic construct
  source 1..22: mol_type = other RNA
acctgttcacgctgtcagtgaa

SEQ ID NO: 4601 - RNA, 22 nt, synthetic construct
  source 1..22: mol_type = other RNA
acgagtggttttcactgacagc

SEQ ID NO: 4602 - RNA, 22 nt, synthetic construct
  source 1..22: mol_type = other RNA
acgcaccccagctacctgttca

SEQ ID NO: 4603 - RNA, 22 nt, synthetic construct
  source 1..22: mol_type = other RNA
acgcagaagcagtgcccgcagc

SEQ ID NO: 4604 - RNA, 22 nt, synthetic construct
  source 1..22: mol_type = other RNA
acgcatcctggcctttccggat

SEQ ID NO: 4605 - RNA, 22 nt, synthetic construct
  source 1..22: mol_type = other RNA
acgcattgagtatgccgactcc

SEQ ID NO: 4606 - RNA, 22 nt, synthetic construct
  source 1..22: mol_type = other RNA
acgctgtcagtgaaaaccactc

SEQ ID NO: 4607 - RNA, 22 nt, synthetic construct
  source 1..22: mol_type = other RNA
acggaagctggagtcggcatac

SEQ ID NO: 4608 - RNA, 22 nt, synthetic construct
  source 1..22: mol_type = other RNA
acggccagcgaggcccgacaac

SEQ ID NO: 4609 - RNA, 22 nt, synthetic construct
  source 1..22: mol_type = other RNA
acggttgatgacaaggcggcac

SEQ ID NO: 4610 - RNA, 22 nt, synthetic construct
  source 1..22: mol_type = other RNA
acgtactaagaacgtgccttct

SEQ ID NO: 4611 - RNA, 22 nt, synthetic construct
  source 1..22: mol_type = other RNA
acgtcggccaccagacggttga

SEQ ID NO: 4612 - RNA, 22 nt, synthetic construct
  source 1..22: mol_type = other RNA
acgtgacagcacgcaccccagc

SEQ ID NO: 4613 - RNA, 22 nt, synthetic construct
  source 1..22: mol_type = other RNA
acgtgccttctggcatcttctg

SEQ ID NO: 4614 - RNA, 22 nt, synthetic construct
  source 1..22: mol_type = other RNA
acgtggactgcctgccactgcc

SEQ ID NO: 4615 - RNA, 22 nt, synthetic construct
  source 1..22: mol_type = other RNA
acgttcttagtacgtgacagca

SEQ ID NO: 4616 - RNA, 22 nt, synthetic construct
  source 1..22: mol_type = other RNA
actaagaacgtgccttctggca

SEQ ID NO: 4617 - RNA, 22 nt, synthetic construct
  source 1..22: mol_type = other RNA
actacctccgacagtacccctt

SEQ ID NO: 4618 - RNA, 22 nt, synthetic construct
  source 1..22: mol_type = other RNA
actaggcgcatcctccttaggc

SEQ ID NO: 4619 - RNA, 22 nt, synthetic construct
  source 1..22: mol_type = other RNA
actatgtggcctcctgcactgc

SEQ ID NO: 4620 - RNA, 22 nt, synthetic construct
  source 1..22: mol_type = other RNA
actcaatgcgtacattggtggg

SEQ ID NO: 4621 - RNA, 22 nt, synthetic construct
  source 1..22: mol_type = other RNA
actccaactgcttgtccaggcc

SEQ ID NO: 4622 - RNA, 22 nt, synthetic construct
  source 1..22: mol_type = other RNA
actccagcttccgtctggactc

SEQ ID NO: 4623 - RNA, 22 nt, synthetic construct
  source 1..22: mol_type = other RNA
actcgtggccccaccaatgtac

SEQ ID NO: 4624 - RNA, 22 nt, synthetic construct
  source 1..22: mol_type = other RNA
actgacagcgtgaacaggtagc

SEQ ID NO: 4625 - RNA, 22 nt, synthetic construct
  source 1..22: mol_type = other RNA
actgccccggcgcatggccgac

SEQ ID NO: 4626 - RNA, 22 nt, synthetic construct
  source 1..22: mol_type = other RNA
actgcctgccactgccccggcg

SEQ ID NO: 4627 - RNA, 22 nt, synthetic construct
  source 1..22: mol_type = other RNA
actgcctgctcctccaccagcc

SEQ ID NO: 4628 - RNA, 22 nt, synthetic construct
  source 1..22: mol_type = other RNA
actgctgatacccgaagcgaca

SEQ ID NO: 4629 - RNA, 22 nt, synthetic construct
  source 1..22: mol_type = other RNA
actgctgtacacctaaaactgg

SEQ ID NO: 4630 - RNA, 22 nt, synthetic construct
  source 1..22: mol_type = other RNA
actgcttctgcgtacaaagggc

SEQ ID NO: 4631 - RNA, 22 nt, synthetic construct
  source 1..22: mol_type = other RNA
actgcttgtccaggccacgcat

SEQ ID NO: 4632 - RNA, 22 nt, synthetic construct
  source 1..22: mol_type = other RNA
actggtgcagccctttgtacgc

SEQ ID NO: 4633 - RNA, 22 nt, synthetic construct
  source 1..22: mol_type = other RNA
actgtacggggcaatctgccca

SEQ ID NO: 4634 - RNA, 22 nt, synthetic construct
  source 1..22: mol_type = other RNA
actgtcggaggtagtcggccat

SEQ ID NO: 4635 - RNA, 22 nt, synthetic construct
  source 1..22: mol_type = other RNA
acttgcctaggctggtattggg

SEQ ID NO: 4636 - RNA, 22 nt, synthetic construct
  source 1..22: mol_type = other RNA
agaacgtgccttctggcatctt

SEQ ID NO: 4637 - RNA, 22 nt, synthetic construct
  source 1..22: mol_type = other RNA
agaagatgccagaaggcacgtt

SEQ ID NO: 4638 - RNA, 22 nt, synthetic construct
  source 1..22: mol_type = other RNA
agaagcagtgcccgcagcctgc

SEQ ID NO: 4639 - RNA, 22 nt, synthetic construct
  source 1..22: mol_type = other RNA
agaaggcacgttcttagtacgt

SEQ ID NO: 4640 - RNA, 22 nt, synthetic construct
  source 1..22: mol_type = other RNA
agacggaagctggagtcggcat

SEQ ID NO: 4641 - RNA, 22 nt, synthetic construct
  source 1..22: mol_type = other RNA
agacggttgatgacaaggcggc

SEQ ID NO: 4642 - RNA, 22 nt, synthetic construct
  source 1..22: mol_type = other RNA
agagctggaaggggtactgtcg

SEQ ID NO: 4643 - RNA, 22 nt, synthetic construct
  source 1..22: mol_type = other RNA
agatgccagaaggcacgttctt

SEQ ID NO: 4644 - RNA, 22 nt, synthetic construct
  source 1..22: mol_type = other RNA
agattgccccgtacagtcagag

SEQ ID NO: 4645 - RNA, 22 nt, synthetic construct
  source 1..22: mol_type = other RNA
agcacgcaccccagctacctgt

SEQ ID NO: 4646 - RNA, 22 nt, synthetic construct
  source 1..22: mol_type = other RNA
agcactatgtggcctcctgcac

SEQ ID NO: 4647 - RNA, 22 nt, synthetic construct
  source 1..22: mol_type = other RNA
agcactgcctgctcctccacca

SEQ ID NO: 4648 - RNA, 22 nt, synthetic construct
  source 1..22: mol_type = other RNA
agcaggatcggggctgtcgctt

SEQ ID NO: 4649 - RNA, 22 nt, synthetic construct
  source 1..22: mol_type = other RNA
agcaggcagtgctgggtcacta

SEQ ID NO: 4650 - RNA, 22 nt, synthetic construct
  source 1..22: mol_type = other RNA
agcagtgcaggaggccacatag

SEQ ID NO: 4651 - RNA, 22 nt, synthetic construct
  source 1..22: mol_type = other RNA
agcagtgcccgcagcctgcaac

SEQ ID NO: 4652 - RNA, 22 nt, synthetic construct
  source 1..22: mol_type = other RNA
agcagtggctggtggaggagca

SEQ ID NO: 4653 - RNA, 22 nt, synthetic construct
  source 1..22: mol_type = other RNA
agcagttggagtccagacggaa

SEQ ID NO: 4654 - RNA, 22 nt, synthetic construct
  source 1..22: mol_type = other RNA
agccactgctgtacacctaaaa

SEQ ID NO: 4655 - RNA, 22 nt, synthetic construct
  source 1..22: mol_type = other RNA
agccccgatcctgctcccaccc

SEQ ID NO: 4656 - RNA, 22 nt, synthetic construct
  source 1..22: mol_type = other RNA
agccctttgtacgcagaagcag

SEQ ID NO: 4657 - RNA, 22 nt, synthetic construct
  source 1..22: mol_type = other RNA
agcctaggcaagtgcagagggg

SEQ ID NO: 4658 - RNA, 22 nt, synthetic construct
  source 1..22: mol_type = other RNA
agcctgcaacacctgtgccgcc

SEQ ID NO: 4659 - RNA, 22 nt, synthetic construct
  source 1..22: mol_type = other RNA
agccttgtgcagcactatgtgg

SEQ ID NO: 4660 - RNA, 22 nt, synthetic construct
  source 1..22: mol_type = other RNA
agcgacagccccgatcctgctc

SEQ ID NO: 4661 - RNA, 22 nt, synthetic construct
  source 1..22: mol_type = other RNA
agcgaggcccgacaacacctgc

SEQ ID NO: 4662 - RNA, 22 nt, synthetic construct
  source 1..22: mol_type = other RNA
agcgtgaacaggtagctggggt

SEQ ID NO: 4663 - RNA, 22 nt, synthetic construct
  source 1..22: mol_type = other RNA
agctacctgttcacgctgtcag

SEQ ID NO: 4664 - RNA, 22 nt, synthetic construct
  source 1..22: mol_type = other RNA
agctctgactgtacggggcaat

SEQ ID NO: 4665 - RNA, 22 nt, synthetic construct
  source 1..22: mol_type = other RNA
agctggaaggggtactgtcgga

SEQ ID NO: 4666 - RNA, 22 nt, synthetic construct
  source 1..22: mol_type = other RNA
agctggagtcggcatactcaat

SEQ ID NO: 4667 - RNA, 22 nt, synthetic construct
  source 1..22: mol_type = other RNA
agctggggtgcgtgctgtcacg

SEQ ID NO: 4668 - RNA, 22 nt, synthetic construct
  source 1..22: mol_type = other RNA
agcttccgtctggactccaact

SEQ ID NO: 4669 - RNA, 22 nt, synthetic construct
  source 1..22: mol_type = other RNA
aggagcaggcagtgctgggtca

SEQ ID NO: 4670 - RNA, 22 nt, synthetic construct
  source 1..22: mol_type = other RNA
aggaggatgcgcctagtgaccc

SEQ ID NO: 4671 - RNA, 22 nt, synthetic construct
  source 1..22: mol_type = other RNA
aggaggccacatagtgctgcac

SEQ ID NO: 4672 - RNA, 22 nt, synthetic construct
  source 1..22: mol_type = other RNA
aggatcggggctgtcgcttcgg

SEQ ID NO: 4673 - RNA, 22 nt, synthetic construct
  source 1..22: mol_type = other RNA
aggatgcgcctagtgacccagc

SEQ ID NO: 4674 - RNA, 22 nt, synthetic construct
  source 1..22: mol_type = other RNA
aggatgcgtggcctggacaagc

SEQ ID NO: 4675 - RNA, 22 nt, synthetic construct
  source 1..22: mol_type = other RNA
aggcacgttcttagtacgtgac

SEQ ID NO: 4676 - RNA, 22 nt, synthetic construct
  source 1..22: mol_type = other RNA
aggcagggccggggtgggagca

SEQ ID NO: 4677 - RNA, 22 nt, synthetic construct
  source 1..22: mol_type = other RNA
aggcagtccacgtcggccacca

SEQ ID NO: 4678 - RNA, 22 nt, synthetic construct
  source 1..22: mol_type = other RNA
aggcagtgctgggtcactaggc

SEQ ID NO: 4679 - RNA, 22 nt, synthetic construct
  source 1..22: mol_type = other RNA
aggcataggcagggccggggtg

SEQ ID NO: 4680 - RNA, 22 nt, synthetic construct
  source 1..22: mol_type = other RNA
aggccacatagtgctgcacaag

SEQ ID NO: 4681 - RNA, 22 nt, synthetic construct
  source 1..22: mol_type = other RNA
aggccacgcatcctggcctttc

SEQ ID NO: 4682 - RNA, 22 nt, synthetic construct
  source 1..22: mol_type = other RNA
aggccaggatgcgtggcctgga

SEQ ID NO: 4683 - RNA, 22 nt, synthetic construct
  source 1..22: mol_type = other RNA
aggcccgacaacacctgcagaa

SEQ ID NO: 4684 - RNA, 22 nt, synthetic construct
  source 1..22: mol_type = other RNA
aggcgcatcctccttaggcata

SEQ ID NO: 4685 - RNA, 22 nt, synthetic construct
  source 1..22: mol_type = other RNA
aggcggcacaggtgttgcaggc

SEQ ID NO: 4686 - RNA, 22 nt, synthetic construct
  source 1..22: mol_type = other RNA
aggctgaccacatccggaaagg

SEQ ID NO: 4687 - RNA, 22 nt, synthetic construct
  source 1..22: mol_type = other RNA
aggctgcgggcactgcttctgc

SEQ ID NO: 4688 - RNA, 22 nt, synthetic construct
  source 1..22: mol_type = other RNA
aggctggtattggggttccatt

SEQ ID NO: 4689 - RNA, 22 nt, synthetic construct
  source 1..22: mol_type = other RNA
agggccggggtgggagcaggat

SEQ ID NO: 4690 - RNA, 22 nt, synthetic construct
  source 1..22: mol_type = other RNA
agggctgcaccagttttaggtg

SEQ ID NO: 4691 - RNA, 22 nt, synthetic construct
  source 1..22: mol_type = other RNA
aggggtactgtcggaggtagtc

SEQ ID NO: 4692 - RNA, 22 nt, synthetic construct
  source 1..22: mol_type = other RNA
agggtgggcagattgccccgta

SEQ ID NO: 4693 - RNA, 22 nt, synthetic construct
  source 1..22: mol_type = other RNA
aggtagctggggtgcgtgctgt

SEQ ID NO: 4694 - RNA, 22 nt, synthetic construct
  source 1..22: mol_type = other RNA
aggtagtcggccatgcgccggg

SEQ ID NO: 4695 - RNA, 22 nt, synthetic construct
  source 1..22: mol_type = other RNA
aggtgtacagcagtggctggtg

SEQ ID NO: 4696 - RNA, 22 nt, synthetic construct
  source 1..22: mol_type = other RNA
aggtgttgcaggctgcgggcac

SEQ ID NO: 4697 - RNA, 22 nt, synthetic construct
  source 1..22: mol_type = other RNA
aggtgttgtcgggcctcgctgg

SEQ ID NO: 4698 - RNA, 22 nt, synthetic construct
  source 1..22: mol_type = other RNA
agtaccccttccagctctgact

SEQ ID NO: 4699 - RNA, 22 nt, synthetic construct
  source 1..22: mol_type = other RNA
agtacgtgacagcacgcacccc

SEQ ID NO: 4700 - RNA, 22 nt, synthetic construct
  source 1..22: mol_type = other RNA
agtatgccgactccagcttccg

SEQ ID NO: 4701 - RNA, 22 nt, synthetic construct
  source 1..22: mol_type = other RNA
agtcagagctggaaggggtact

SEQ ID NO: 4702 - RNA, 22 nt, synthetic construct
  source 1..22: mol_type = other RNA
agtccacgtcggccaccagacg

SEQ ID NO: 4703 - RNA, 22 nt, synthetic construct
  source 1..22: mol_type = other RNA
agtccagacggaagctggagtc

SEQ ID NO: 4704 - RNA, 22 nt, synthetic construct
  source 1..22: mol_type = other RNA
agtcggcatactcaatgcgtac

SEQ ID NO: 4705 - RNA, 22 nt, synthetic construct
  source 1..22: mol_type = other RNA
agtcggccatgcgccggggcag

SEQ ID NO: 4706 - RNA, 22 nt, synthetic construct
  source 1..22: mol_type = other RNA
agtgaaaaccactcgtggcccc

SEQ ID NO: 4707 - RNA, 22 nt, synthetic construct
  source 1..22: mol_type = other RNA
agtgacccagcactgcctgctc

SEQ ID NO: 4708 - RNA, 22 nt, synthetic construct
  source 1..22: mol_type = other RNA
agtgcaggaggccacatagtgc

SEQ ID NO: 4709 - RNA, 22 nt, synthetic construct
  source 1..22: mol_type = other RNA
agtgcccgcagcctgcaacacc

SEQ ID NO: 4710 - RNA, 22 nt, synthetic construct
  source 1..22: mol_type = other RNA
agtgctgcacaaggctgaccac

SEQ ID NO: 4711 - RNA, 22 nt, synthetic construct
  source 1..22: mol_type = other RNA
agtgctgggtcactaggcgcat

SEQ ID NO: 4712 - RNA, 22 nt, synthetic construct
  source 1..22: mol_type = other RNA
agtggcaggcagtccacgtcgg

SEQ ID NO: 4713 - RNA, 22 nt, synthetic construct
  source 1..22: mol_type = other RNA
agtggctggtggaggagcaggc

SEQ ID NO: 4714 - RNA, 22 nt, synthetic construct
  source 1..22: mol_type = other RNA
agtggttttcactgacagcgtg

SEQ ID NO: 4715 - RNA, 22 nt, synthetic construct
  source 1..22: mol_type = other RNA
agttggagtccagacggaagct

SEQ ID NO: 4716 - RNA, 22 nt, synthetic construct
  source 1..22: mol_type = other RNA
agttttaggtgtacagcagtgg

SEQ ID NO: 4717 - RNA, 22 nt, synthetic construct
  source 1..22: mol_type = other RNA
ataccagcctaggcaagtgcag

SEQ ID NO: 4718 - RNA, 22 nt, synthetic construct
  source 1..22: mol_type = other RNA
atacccgaagcgacagccccga

SEQ ID NO: 4719 - RNA, 22 nt, synthetic construct
  source 1..22: mol_type = other RNA
atactcaatgcgtacattggtg

SEQ ID NO: 4720 - RNA, 22 nt, synthetic construct
  source 1..22: mol_type = other RNA
ataggcagggccggggtgggag

SEQ ID NO: 4721 - RNA, 22 nt, synthetic construct
  source 1..22: mol_type = other RNA
atagtgctgcacaaggctgacc

SEQ ID NO: 4722 - RNA, 22 nt, synthetic construct
  source 1..22: mol_type = other RNA
atcaaccgtctggtggccgacg

SEQ ID NO: 4723 - RNA, 22 nt, synthetic construct
  source 1..22: mol_type = other RNA
atcagcagtgcaggaggccaca

SEQ ID NO: 4724 - RNA, 22 nt, synthetic construct
  source 1..22: mol_type = other RNA
atccggaaaggccaggatgcgt

SEQ ID NO: 4725 - RNA, 22 nt, synthetic construct
  source 1..22: mol_type = other RNA
atcctccttaggcataggcagg

SEQ ID NO: 4726 - RNA, 22 nt, synthetic construct
  source 1..22: mol_type = other RNA
atcctgctcccaccccggccct

SEQ ID NO: 4727 - RNA, 22 nt, synthetic construct
  source 1..22: mol_type = other RNA
atcctggcctttccggatgtgg

SEQ ID NO: 4728 - RNA, 22 nt, synthetic construct
  source 1..22: mol_type = other RNA
atcggggctgtcgcttcgggta

SEQ ID NO: 4729 - RNA, 22 nt, synthetic construct
  source 1..22: mol_type = other RNA
atcttctgcaggtgttgtcggg

SEQ ID NO: 4730 - RNA, 22 nt, synthetic construct
  source 1..22: mol_type = other RNA
atgacaaggcggcacaggtgtt

SEQ ID NO: 4731 - RNA, 22 nt, synthetic construct
  source 1..22: mol_type = other RNA
atgccagaaggcacgttcttag

SEQ ID NO: 4732 - RNA, 22 nt, synthetic construct
  source 1..22: mol_type = other RNA
atgccgactccagcttccgtct

SEQ ID NO: 4733 - RNA, 22 nt, synthetic construct
  source 1..22: mol_type = other RNA
atgcctaaggaggatgcgccta

SEQ ID NO: 4734 - RNA, 22 nt, synthetic construct
  source 1..22: mol_type = other RNA
atgcgccggggcagtggcaggc

SEQ ID NO: 4735 - RNA, 22 nt, synthetic construct
  source 1..22: mol_type = other RNA
atgcgcctagtgacccagcact

SEQ ID NO: 4736 - RNA, 22 nt, synthetic construct
  source 1..22: mol_type = other RNA
atgcgtacattggtggggccac

SEQ ID NO: 4737 - RNA, 22 nt, synthetic construct
  source 1..22: mol_type = other RNA
atgcgtggcctggacaagcagt

SEQ ID NO: 4738 - RNA, 22 nt, synthetic construct
  source 1..22: mol_type = other RNA
atggaaccccaataccagccta

SEQ ID NO: 4739 - RNA, 22 nt, synthetic construct
  source 1..22: mol_type = other RNA
atggccgactacctccgacagt

SEQ ID NO: 4740 - RNA, 22 nt, synthetic construct
  source 1..22: mol_type = other RNA
atgtacgcattgagtatgccga

SEQ ID NO: 4741 - RNA, 22 nt, synthetic construct
  source 1..22: mol_type = other RNA
atgtcccttggccccctctgca

SEQ ID NO: 4742 - RNA, 22 nt, synthetic construct
  source 1..22: mol_type = other RNA
atgtggcctcctgcactgctga

SEQ ID NO: 4743 - RNA, 22 nt, synthetic construct
  source 1..22: mol_type = other RNA
atgtggtcagccttgtgcagca

SEQ ID NO: 4744 - RNA, 22 nt, synthetic construct
  source 1..22: mol_type = other RNA
attacggccagcgaggcccgac

SEQ ID NO: 4745 - RNA, 22 nt, synthetic construct
  source 1..22: mol_type = other RNA
attgagtatgccgactccagct

SEQ ID NO: 4746 - RNA, 22 nt, synthetic construct
  source 1..22: mol_type = other RNA
attgccccgtacagtcagagct

SEQ ID NO: 4747 - RNA, 22 nt, synthetic construct
  source 1..22: mol_type = other RNA
attggggttccattacggccag

SEQ ID NO: 4748 - RNA, 22 nt, synthetic construct
  source 1..22: mol_type = other RNA
attggtggggccacgagtggtt

SEQ ID NO: 4749 - RNA, 22 nt, synthetic construct
  source 1..22: mol_type = other RNA
caaagggctgcaccagttttag

SEQ ID NO: 4750 - RNA, 22 nt, synthetic construct
  source 1..22: mol_type = other RNA
caacacctgcagaagatgccag

SEQ ID NO: 4751 - RNA, 22 nt, synthetic construct
  source 1..22: mol_type = other RNA
caacacctgtgccgccttgtca

SEQ ID NO: 4752 - RNA, 22 nt, synthetic construct
  source 1..22: mol_type = other RNA
caaccgtctggtggccgacgtg

SEQ ID NO: 4753 - RNA, 22 nt, synthetic construct
  source 1..22: mol_type = other RNA
caactgcttgtccaggccacgc

SEQ ID NO: 4754 - RNA, 22 nt, synthetic construct
  source 1..22: mol_type = other RNA
caagcagttggagtccagacgg

SEQ ID NO: 4755 - RNA, 22 nt, synthetic construct
  source 1..22: mol_type = other RNA
caaggcggcacaggtgttgcag

SEQ ID NO: 4756 - RNA, 22 nt, synthetic construct
  source 1..22: mol_type = other RNA
caaggctgaccacatccggaaa

SEQ ID NO: 4757 - RNA, 22 nt, synthetic construct
  source 1..22: mol_type = other RNA
caataccagcctaggcaagtgc

SEQ ID NO: 4758 - RNA, 22 nt, synthetic construct
  source 1..22: mol_type = other RNA
caatgcgtacattggtggggcc

SEQ ID NO: 4759 - RNA, 22 nt, synthetic construct
  source 1..22: mol_type = other RNA
caatgtacgcattgagtatgcc

SEQ ID NO: 4760 - RNA, 22 nt, synthetic construct
  source 1..22: mol_type = other RNA
cacaaggctgaccacatccgga

SEQ ID NO: 4761 - RNA, 22 nt, synthetic construct
  source 1..22: mol_type = other RNA
cacaggtgttgcaggctgcggg

SEQ ID NO: 4762 - RNA, 22 nt, synthetic construct
  source 1..22: mol_type = other RNA
cacatagtgctgcacaaggctg

SEQ ID NO: 4763 - RNA, 22 nt, synthetic construct
  source 1..22: mol_type = other RNA
cacatccggaaaggccaggatg

SEQ ID NO: 4764 - RNA, 22 nt, synthetic construct
  source 1..22: mol_type = other RNA
caccaatgtacgcattgagtat

SEQ ID NO: 4765 - RNA, 22 nt, synthetic construct
  source 1..22: mol_type = other RNA
caccagacggttgatgacaagg

SEQ ID NO: 4766 - RNA, 22 nt, synthetic construct
  source 1..22: mol_type = other RNA
caccagccactgctgtacacct

SEQ ID NO: 4767 - RNA, 22 nt, synthetic construct
  source 1..22: mol_type = other RNA
caccagttttaggtgtacagca

SEQ ID NO: 4768 - RNA, 22 nt, synthetic construct
  source 1..22: mol_type = other RNA
caccccagctacctgttcacgc

SEQ ID NO: 4769 - RNA, 22 nt, synthetic construct
  source 1..22: mol_type = other RNA
caccccggccctgcctatgcct

SEQ ID NO: 4770 - RNA, 22 nt, synthetic construct
  source 1..22: mol_type = other RNA
cacctaaaactggtgcagccct

SEQ ID NO: 4771 - RNA, 22 nt, synthetic construct
  source 1..22: mol_type = other RNA
cacctgcagaagatgccagaag

SEQ ID NO: 4772 - RNA, 22 nt, synthetic construct
  source 1..22: mol_type = other RNA
cacctgtgccgccttgtcatca

SEQ ID NO: 4773 - RNA, 22 nt, synthetic construct
  source 1..22: mol_type = other RNA
cacgagtggttttcactgacag

SEQ ID NO: 4774 - RNA, 22 nt, synthetic construct
  source 1..22: mol_type = other RNA
cacgcaccccagctacctgttc

SEQ ID NO: 4775 - RNA, 22 nt, synthetic construct
  source 1..22: mol_type = other RNA
cacgcatcctggcctttccgga

SEQ ID NO: 4776 - RNA, 22 nt, synthetic construct
  source 1..22: mol_type = other RNA
cacgctgtcagtgaaaaccact

SEQ ID NO: 4777 - RNA, 22 nt, synthetic construct
  source 1..22: mol_type = other RNA
cacgtactaagaacgtgccttc

SEQ ID NO: 4778 - RNA, 22 nt, synthetic construct
  source 1..22: mol_type = other RNA
cacgtcggccaccagacggttg

SEQ ID NO: 4779 - RNA, 22 nt, synthetic construct
  source 1..22: mol_type = other RNA
cacgttcttagtacgtgacagc

SEQ ID NO: 4780 - RNA, 22 nt, synthetic construct
  source 1..22: mol_type = other RNA
cactaggcgcatcctccttagg

SEQ ID NO: 4781 - RNA, 22 nt, synthetic construct
  source 1..22: mol_type = other RNA
cactatgtggcctcctgcactg

SEQ ID NO: 4782 - RNA, 22 nt, synthetic construct
  source 1..22: mol_type = other RNA
cactcgtggccccaccaatgta

SEQ ID NO: 4783 - RNA, 22 nt, synthetic construct
  source 1..22: mol_type = other RNA
cactgacagcgtgaacaggtag

SEQ ID NO: 4784 - RNA, 22 nt, synthetic construct
  source 1..22: mol_type = other RNA
cactgccccggcgcatggccga

SEQ ID NO: 4785 - RNA, 22 nt, synthetic construct
  source 1..22: mol_type = other RNA
cactgcctgctcctccaccagc

SEQ ID NO: 4786 - RNA, 22 nt, synthetic construct
  source 1..22: mol_type = other RNA
cactgctgatacccgaagcgac

SEQ ID NO: 4787 - RNA, 22 nt, synthetic construct
  source 1..22: mol_type = other RNA
cactgctgtacacctaaaactg

SEQ ID NO: 4788 - RNA, 22 nt, synthetic construct
  source 1..22: mol_type = other RNA
cactgcttctgcgtacaaaggg

SEQ ID NO: 4789 - RNA, 22 nt, synthetic construct
  source 1..22: mol_type = other RNA
cacttgcctaggctggtattgg

SEQ ID NO: 4790 - RNA, 22 nt, synthetic construct
  source 1..22: mol_type = other RNA
cagaagatgccagaaggcacgt

SEQ ID NO: 4791 - RNA, 22 nt, synthetic construct
  source 1..22: mol_type = other RNA
cagaagcagtgcccgcagcctg

SEQ ID NO: 4792 - RNA, 22 nt, synthetic construct
  source 1..22: mol_type = other RNA
cagaaggcacgttcttagtacg

SEQ ID NO: 4793 - RNA, 22 nt, synthetic construct
  source 1..22: mol_type = other RNA
cagacggaagctggagtcggca

SEQ ID NO: 4794 - RNA, 22 nt, synthetic construct
  source 1..22: mol_type = other RNA
cagacggttgatgacaaggcgg

SEQ ID NO: 4795 - RNA, 22 nt, synthetic construct
  source 1..22: mol_type = other RNA
cagagctggaaggggtactgtc

SEQ ID NO: 4796 - RNA, 22 nt, synthetic construct
  source 1..22: mol_type = other RNA
cagattgccccgtacagtcaga

SEQ ID NO: 4797 - RNA, 22 nt, synthetic construct
  source 1..22: mol_type = other RNA
cagcacgcaccccagctacctg

SEQ ID NO: 4798 - RNA, 22 nt, synthetic construct
  source 1..22: mol_type = other RNA
cagcactatgtggcctcctgca

SEQ ID NO: 4799 - RNA, 22 nt, synthetic construct
  source 1..22: mol_type = other RNA
cagcactgcctgctcctccacc

SEQ ID NO: 4800 - RNA, 22 nt, synthetic construct
  source 1..22: mol_type = other RNA
cagcagtgcaggaggccacata

SEQ ID NO: 4801 - RNA, 22 nt, synthetic construct
  source 1..22: mol_type = other RNA
cagcagtggctggtggaggagc

SEQ ID NO: 4802 - RNA, 22 nt, synthetic construct
  source 1..22: mol_type = other RNA
cagccactgctgtacacctaaa

SEQ ID NO: 4803 - RNA, 22 nt, synthetic construct
  source 1..22: mol_type = other RNA
cagccccgatcctgctcccacc

SEQ ID NO: 4804 - RNA, 22 nt, synthetic construct
  source 1..22: mol_type = other RNA
cagccctttgtacgcagaagca

SEQ ID NO: 4805 - RNA, 22 nt, synthetic construct
  source 1..22: mol_type = other RNA
cagcctaggcaagtgcagaggg

SEQ ID NO: 4806 - RNA, 22 nt, synthetic construct
  source 1..22: mol_type = other RNA
cagcctgcaacacctgtgccgc

SEQ ID NO: 4807 - RNA, 22 nt, synthetic construct
  source 1..22: mol_type = other RNA
cagccttgtgcagcactatgtg

SEQ ID NO: 4808 - RNA, 22 nt, synthetic construct
  source 1..22: mol_type = other RNA
cagcgaggcccgacaacacctg

SEQ ID NO: 4809 - RNA, 22 nt, synthetic construct
  source 1..22: mol_type = other RNA
cagcgtgaacaggtagctgggg

SEQ ID NO: 4810 - RNA, 22 nt, synthetic construct
  source 1..22: mol_type = other RNA
cagctacctgttcacgctgtca

SEQ ID NO: 4811 - RNA, 22 nt, synthetic construct
  source 1..22: mol_type = other RNA
cagctctgactgtacggggcaa

SEQ ID NO: 4812 - RNA, 22 nt, synthetic construct
  source 1..22: mol_type = other RNA
cagcttccgtctggactccaac

SEQ ID NO: 4813 - RNA, 22 nt, synthetic construct
  source 1..22: mol_type = other RNA
caggaggccacatagtgctgca

SEQ ID NO: 4814 - RNA, 22 nt, synthetic construct
  source 1..22: mol_type = other RNA
caggatcggggctgtcgcttcg

SEQ ID NO: 4815 - RNA, 22 nt, synthetic construct
  source 1..22: mol_type = other RNA
caggatgcgtggcctggacaag

SEQ ID NO: 4816 - RNA, 22 nt, synthetic construct
  source 1..22: mol_type = other RNA
caggcagtccacgtcggccacc

SEQ ID NO: 4817 - RNA, 22 nt, synthetic construct
  source 1..22: mol_type = other RNA
caggcagtgctgggtcactagg

SEQ ID NO: 4818 - RNA, 22 nt, synthetic construct
  source 1..22: mol_type = other RNA
caggccacgcatcctggccttt

SEQ ID NO: 4819 - RNA, 22 nt, synthetic construct
  source 1..22: mol_type = other RNA
caggctgcgggcactgcttctg

SEQ ID NO: 4820 - RNA, 22 nt, synthetic construct
  source 1..22: mol_type = other RNA
cagggccggggtgggagcagga

SEQ ID NO: 4821 - RNA, 22 nt, synthetic construct
  source 1..22: mol_type = other RNA
caggtagctggggtgcgtgctg

SEQ ID NO: 4822 - RNA, 22 nt, synthetic construct
  source 1..22: mol_type = other RNA
caggtgttgcaggctgcgggca

SEQ ID NO: 4823 - RNA, 22 nt, synthetic construct
  source 1..22: mol_type = other RNA
caggtgttgtcgggcctcgctg

SEQ ID NO: 4824 - RNA, 22 nt, synthetic construct
  source 1..22: mol_type = other RNA
cagtaccccttccagctctgac

SEQ ID NO: 4825 - RNA, 22 nt, synthetic construct
  source 1..22: mol_type = other RNA
cagtcagagctggaaggggtac

SEQ ID NO: 4826 - RNA, 22 nt, synthetic construct
  source 1..22: mol_type = other RNA
cagtccacgtcggccaccagac

SEQ ID NO: 4827 - RNA, 22 nt, synthetic construct
  source 1..22: mol_type = other RNA
cagtgaaaaccactcgtggccc

SEQ ID NO: 4828 - RNA, 22 nt, synthetic construct
  source 1..22: mol_type = other RNA
cagtgcaggaggccacatagtg

SEQ ID NO: 4829 - RNA, 22 nt, synthetic construct
  source 1..22: mol_type = other RNA
cagtgcccgcagcctgcaacac

SEQ ID NO: 4830 - RNA, 22 nt, synthetic construct
  source 1..22: mol_type = other RNA
cagtgctgggtcactaggcgca

SEQ ID NO: 4831 - RNA, 22 nt, synthetic construct
  source 1..22: mol_type = other RNA
cagtggcaggcagtccacgtcg

SEQ ID NO: 4832 - RNA, 22 nt, synthetic construct
  source 1..22: mol_type = other RNA
cagtggctggtggaggagcagg

SEQ ID NO: 4833 - RNA, 22 nt, synthetic construct
  source 1..22: mol_type = other RNA
cagttggagtccagacggaagc

SEQ ID NO: 4834 - RNA, 22 nt, synthetic construct
  source 1..22: mol_type = other RNA
cagttttaggtgtacagcagtg

SEQ ID NO: 4835 - RNA, 22 nt, synthetic construct
  source 1..22: mol_type = other RNA
catactcaatgcgtacattggt

SEQ ID NO: 4836 - RNA, 22 nt, synthetic construct
  source 1..22: mol_type = other RNA
cataggcagggccggggtggga

SEQ ID NO: 4837 - RNA, 22 nt, synthetic construct
  source 1..22: mol_type = other RNA
catagtgctgcacaaggctgac

SEQ ID NO: 4838 - RNA, 22 nt, synthetic construct
  source 1..22: mol_type = other RNA
catcaaccgtctggtggccgac

SEQ ID NO: 4839 - RNA, 22 nt, synthetic construct
  source 1..22: mol_type = other RNA
catccggaaaggccaggatgcg

SEQ ID NO: 4840 - RNA, 22 nt, synthetic construct
  source 1..22: mol_type = other RNA
catcctccttaggcataggcag

SEQ ID NO: 4841 - RNA, 22 nt, synthetic construct
  source 1..22: mol_type = other RNA
catcctggcctttccggatgtg

SEQ ID NO: 4842 - RNA, 22 nt, synthetic construct
  source 1..22: mol_type = other RNA
catcttctgcaggtgttgtcgg

SEQ ID NO: 4843 - RNA, 22 nt, synthetic construct
  source 1..22: mol_type = other RNA
catgcgccggggcagtggcagg

SEQ ID NO: 4844 - RNA, 22 nt, synthetic construct
  source 1..22: mol_type = other RNA
catggccgactacctccgacag

SEQ ID NO: 4845 - RNA, 22 nt, synthetic construct
  source 1..22: mol_type = other RNA
cattacggccagcgaggcccga

SEQ ID NO: 4846 - RNA, 22 nt, synthetic construct
  source 1..22: mol_type = other RNA
cattgagtatgccgactccagc

SEQ ID NO: 4847 - RNA, 22 nt, synthetic construct
  source 1..22: mol_type = other RNA
cattggtggggccacgagtggt

SEQ ID NO: 4848 - RNA, 22 nt, synthetic construct
  source 1..22: mol_type = other RNA
ccaactgcttgtccaggccacg

SEQ ID NO: 4849 - RNA, 22 nt, synthetic construct
  source 1..22: mol_type = other RNA
ccaataccagcctaggcaagtg

SEQ ID NO: 4850 - RNA, 22 nt, synthetic construct
  source 1..22: mol_type = other RNA
ccaatgtacgcattgagtatgc

SEQ ID NO: 4851 - RNA, 22 nt, synthetic construct
  source 1..22: mol_type = other RNA
ccacatagtgctgcacaaggct

SEQ ID NO: 4852 - RNA, 22 nt, synthetic construct
  source 1..22: mol_type = other RNA
ccacatccggaaaggccaggat

SEQ ID NO: 4853 - RNA, 22 nt, synthetic construct
  source 1..22: mol_type = other RNA
ccaccaatgtacgcattgagta

SEQ ID NO: 4854 - RNA, 22 nt, synthetic construct
  source 1..22: mol_type = other RNA
ccaccagacggttgatgacaag

SEQ ID NO: 4855 - RNA, 22 nt, synthetic construct
  source 1..22: mol_type = other RNA
ccaccagccactgctgtacacc

SEQ ID NO: 4856 - RNA, 22 nt, synthetic construct
  source 1..22: mol_type = other RNA
ccaccccggccctgcctatgcc

SEQ ID NO: 4857 - RNA, 22 nt, synthetic construct
  source 1..22: mol_type = other RNA
ccacgagtggttttcactgaca

SEQ ID NO: 4858 - RNA, 22 nt, synthetic construct
  source 1..22: mol_type = other RNA
ccacgcatcctggcctttccgg

SEQ ID NO: 4859 - RNA, 22 nt, synthetic construct
  source 1..22: mol_type = other RNA
ccacgtcggccaccagacggtt

SEQ ID NO: 4860 - RNA, 22 nt, synthetic construct
  source 1..22: mol_type = other RNA
ccactcgtggccccaccaatgt

SEQ ID NO: 4861 - RNA, 22 nt, synthetic construct
  source 1..22: mol_type = other RNA
ccactgctgtacacctaaaact

SEQ ID NO: 4862 - RNA, 22 nt, synthetic construct
  source 1..22: mol_type = other RNA
ccagaaggcacgttcttagtac

SEQ ID NO: 4863 - RNA, 22 nt, synthetic construct
  source 1..22: mol_type = other RNA
ccagacggaagctggagtcggc

SEQ ID NO: 4864 - RNA, 22 nt, synthetic construct
  source 1..22: mol_type = other RNA
ccagacggttgatgacaaggcg

SEQ ID NO: 4865 - RNA, 22 nt, synthetic construct
  source 1..22: mol_type = other RNA
ccagcactgcctgctcctccac

SEQ ID NO: 4866 - RNA, 22 nt, synthetic construct
  source 1..22: mol_type = other RNA
ccagccactgctgtacacctaa

SEQ ID NO: 4867 - RNA, 22 nt, synthetic construct
  source 1..22: mol_type = other RNA
ccagcctaggcaagtgcagagg

SEQ ID NO: 4868 - RNA, 22 nt, synthetic construct
  source 1..22: mol_type = other RNA
ccagcgaggcccgacaacacct

SEQ ID NO: 4869 - RNA, 22 nt, synthetic construct
  source 1..22: mol_type = other RNA
ccagctacctgttcacgctgtc

SEQ ID NO: 4870 - RNA, 22 nt, synthetic construct
  source 1..22: mol_type = other RNA
ccagctctgactgtacggggca

SEQ ID NO: 4871 - RNA, 22 nt, synthetic construct
  source 1..22: mol_type = other RNA
ccagcttccgtctggactccaa

SEQ ID NO: 4872 - RNA, 22 nt, synthetic construct
  source 1..22: mol_type = other RNA
ccaggatgcgtggcctggacaa

SEQ ID NO: 4873 - RNA, 22 nt, synthetic construct
  source 1..22: mol_type = other RNA
ccaggccacgcatcctggcctt

SEQ ID NO: 4874 - RNA, 22 nt, synthetic construct
  source 1..22: mol_type = other RNA
ccagttttaggtgtacagcagt

SEQ ID NO: 4875 - RNA, 22 nt, synthetic construct
  source 1..22: mol_type = other RNA
ccatgcgccggggcagtggcag

SEQ ID NO: 4876 - RNA, 22 nt, synthetic construct
  source 1..22: mol_type = other RNA
ccattacggccagcgaggcccg

SEQ ID NO: 4877 - RNA, 22 nt, synthetic construct
  source 1..22: mol_type = other RNA
cccaataccagcctaggcaagt

SEQ ID NO: 4878 - RNA, 22 nt, synthetic construct
  source 1..22: mol_type = other RNA
cccaccaatgtacgcattgagt

SEQ ID NO: 4879 - RNA, 22 nt, synthetic construct
  source 1..22: mol_type = other RNA
cccaccccggccctgcctatgc

SEQ ID NO: 4880 - RNA, 22 nt, synthetic construct
  source 1..22: mol_type = other RNA
cccagcactgcctgctcctcca

SEQ ID NO: 4881 - RNA, 22 nt, synthetic construct
  source 1..22: mol_type = other RNA
cccagctacctgttcacgctgt

SEQ ID NO: 4882 - RNA, 22 nt, synthetic construct
  source 1..22: mol_type = other RNA
ccccaataccagcctaggcaag

SEQ ID NO: 4883 - RNA, 22 nt, synthetic construct
  source 1..22: mol_type = other RNA
ccccaccaatgtacgcattgag

SEQ ID NO: 4884 - RNA, 22 nt, synthetic construct
  source 1..22: mol_type = other RNA
ccccagctacctgttcacgctg

SEQ ID NO: 4885 - RNA, 22 nt, synthetic construct
  source 1..22: mol_type = other RNA
ccccctctgcacttgcctaggc

SEQ ID NO: 4886 - RNA, 22 nt, synthetic construct
  source 1..22: mol_type = other RNA
ccccgatcctgctcccaccccg

SEQ ID NO: 4887 - RNA, 22 nt, synthetic construct
  source 1..22: mol_type = other RNA
ccccggccctgcctatgcctaa

SEQ ID NO: 4888 - RNA, 22 nt, synthetic construct
  source 1..22: mol_type = other RNA
ccccggcgcatggccgactacc

SEQ ID NO: 4889 - RNA, 22 nt, synthetic construct
  source 1..22: mol_type = other RNA
ccccgtacagtcagagctggaa

SEQ ID NO: 4890 - RNA, 22 nt, synthetic construct
  source 1..22: mol_type = other RNA
cccctctgcacttgcctaggct

SEQ ID NO: 4891 - RNA, 22 nt, synthetic construct
  source 1..22: mol_type = other RNA
ccccttccagctctgactgtac

SEQ ID NO: 4892 - RNA, 22 nt, synthetic construct
  source 1..22: mol_type = other RNA
cccgaagcgacagccccgatcc

SEQ ID NO: 4893 - RNA, 22 nt, synthetic construct
  source 1..22: mol_type = other RNA
cccgacaacacctgcagaagat

SEQ ID NO: 4894 - RNA, 22 nt, synthetic construct
  source 1..22: mol_type = other RNA
cccgatcctgctcccaccccgg

SEQ ID NO: 4895 - RNA, 22 nt, synthetic construct
  source 1..22: mol_type = other RNA
cccgcagcctgcaacacctgtg

SEQ ID NO: 4896 - RNA, 22 nt, synthetic construct
  source 1..22: mol_type = other RNA
cccggccctgcctatgcctaag

SEQ ID NO: 4897 - RNA, 22 nt, synthetic construct
  source 1..22: mol_type = other RNA
cccggcgcatggccgactacct

SEQ ID NO: 4898 - RNA, 22 nt, synthetic construct
  source 1..22: mol_type = other RNA
cccgtacagtcagagctggaag

SEQ ID NO: 4899 - RNA, 22 nt, synthetic construct
  source 1..22: mol_type = other RNA
ccctctgcacttgcctaggctg

SEQ ID NO: 4900 - RNA, 22 nt, synthetic construct
  source 1..22: mol_type = other RNA
ccctgcctatgcctaaggagga

SEQ ID NO: 4901 - RNA, 22 nt, synthetic construct
  source 1..22: mol_type = other RNA
cccttccagctctgactgtacg

SEQ ID NO: 4902 - RNA, 22 nt, synthetic construct
  source 1..22: mol_type = other RNA
cccttggccccctctgcacttg

SEQ ID NO: 4903 - RNA, 22 nt, synthetic construct
  source 1..22: mol_type = other RNA
ccctttgtacgcagaagcagtg

SEQ ID NO: 4904 - RNA, 22 nt, synthetic construct
  source 1..22: mol_type = other RNA
ccgaagcgacagccccgatcct

SEQ ID NO: 4905 - RNA, 22 nt, synthetic construct
  source 1..22: mol_type = other RNA
ccgacaacacctgcagaagatg

SEQ ID NO: 4906 - RNA, 22 nt, synthetic construct
  source 1..22: mol_type = other RNA
ccgacagtaccccttccagctc

SEQ ID NO: 4907 - RNA, 22 nt, synthetic construct
  source 1..22: mol_type = other RNA
ccgacgtggactgcctgccact

SEQ ID NO: 4908 - RNA, 22 nt, synthetic construct
  source 1..22: mol_type = other RNA
ccgactacctccgacagtaccc

SEQ ID NO: 4909 - RNA, 22 nt, synthetic construct
  source 1..22: mol_type = other RNA
ccgactccagcttccgtctgga

SEQ ID NO: 4910 - RNA, 22 nt, synthetic construct
  source 1..22: mol_type = other RNA
ccgatcctgctcccaccccggc

SEQ ID NO: 4911 - RNA, 22 nt, synthetic construct
  source 1..22: mol_type = other RNA
ccgcagcctgcaacacctgtgc

SEQ ID NO: 4912 - RNA, 22 nt, synthetic construct
  source 1..22: mol_type = other RNA
ccgccttgtcatcaaccgtctg

SEQ ID NO: 4913 - RNA, 22 nt, synthetic construct
  source 1..22: mol_type = other RNA
ccggaaaggccaggatgcgtgg

SEQ ID NO: 4914 - RNA, 22 nt, synthetic construct
  source 1..22: mol_type = other RNA
ccggatgtggtcagccttgtgc

SEQ ID NO: 4915 - RNA, 22 nt, synthetic construct
  source 1..22: mol_type = other RNA
ccggccctgcctatgcctaagg

SEQ ID NO: 4916 - RNA, 22 nt, synthetic construct
  source 1..22: mol_type = other RNA
ccggcgcatggccgactacctc

SEQ ID NO: 4917 - RNA, 22 nt, synthetic construct
  source 1..22: mol_type = other RNA
ccggggcagtggcaggcagtcc

SEQ ID NO: 4918 - RNA, 22 nt, synthetic construct
  source 1..22: mol_type = other RNA
ccggggtgggagcaggatcggg

SEQ ID NO: 4919 - RNA, 22 nt, synthetic construct
  source 1..22: mol_type = other RNA
ccgtaatggaaccccaatacca

SEQ ID NO: 4920 - RNA, 22 nt, synthetic construct
  source 1..22: mol_type = other RNA
ccgtacagtcagagctggaagg

SEQ ID NO: 4921 - RNA, 22 nt, synthetic construct
  source 1..22: mol_type = other RNA
ccgtctggactccaactgcttg

SEQ ID NO: 4922 - RNA, 22 nt, synthetic construct
  source 1..22: mol_type = other RNA
ccgtctggtggccgacgtggac

SEQ ID NO: 4923 - RNA, 22 nt, synthetic construct
  source 1..22: mol_type = other RNA
cctaaaactggtgcagcccttt

SEQ ID NO: 4924 - RNA, 22 nt, synthetic construct
  source 1..22: mol_type = other RNA
cctaaggaggatgcgcctagtg

SEQ ID NO: 4925 - RNA, 22 nt, synthetic construct
  source 1..22: mol_type = other RNA
cctaggcaagtgcagagggggc

SEQ ID NO: 4926 - RNA, 22 nt, synthetic construct
  source 1..22: mol_type = other RNA
cctaggctggtattggggttcc

SEQ ID NO: 4927 - RNA, 22 nt, synthetic construct
  source 1..22: mol_type = other RNA
cctagtgacccagcactgcctg

SEQ ID NO: 4928 - RNA, 22 nt, synthetic construct
  source 1..22: mol_type = other RNA
cctatgcctaaggaggatgcgc

SEQ ID NO: 4929 - RNA, 22 nt, synthetic construct
  source 1..22: mol_type = other RNA
cctccaccagccactgctgtac

SEQ ID NO: 4930 - RNA, 22 nt, synthetic construct
  source 1..22: mol_type = other RNA
cctccgacagtaccccttccag

SEQ ID NO: 4931 - RNA, 22 nt, synthetic construct
  source 1..22: mol_type = other RNA
cctcctgcactgctgatacccg

SEQ ID NO: 4932 - RNA, 22 nt, synthetic construct
  source 1..22: mol_type = other RNA
cctccttaggcataggcagggc

SEQ ID NO: 4933 - RNA, 22 nt, synthetic construct
  source 1..22: mol_type = other RNA
cctcgctggccgtaatggaacc

SEQ ID NO: 4934 - RNA, 22 nt, synthetic construct
  source 1..22: mol_type = other RNA
cctctgcacttgcctaggctgg

SEQ ID NO: 4935 - RNA, 22 nt, synthetic construct
  source 1..22: mol_type = other RNA
cctgcaacacctgtgccgcctt

SEQ ID NO: 4936 - RNA, 22 nt, synthetic construct
  source 1..22: mol_type = other RNA
cctgcactgctgatacccgaag

SEQ ID NO: 4937 - RNA, 22 nt, synthetic construct
  source 1..22: mol_type = other RNA
cctgcagaagatgccagaaggc

SEQ ID NO: 4938 - RNA, 22 nt, synthetic construct
  source 1..22: mol_type = other RNA
cctgccactgccccggcgcatg

SEQ ID NO: 4939 - RNA, 22 nt, synthetic construct
  source 1..22: mol_type = other RNA
cctgcctatgcctaaggaggat

SEQ ID NO: 4940 - RNA, 22 nt, synthetic construct
  source 1..22: mol_type = other RNA
cctgctcctccaccagccactg

SEQ ID NO: 4941 - RNA, 22 nt, synthetic construct
  source 1..22: mol_type = other RNA
cctggacaagcagttggagtcc

SEQ ID NO: 4942 - RNA, 22 nt, synthetic construct
  source 1..22: mol_type = other RNA
cctggcctttccggatgtggtc

SEQ ID NO: 4943 - RNA, 22 nt, synthetic construct
  source 1..22: mol_type = other RNA
cctgtgccgccttgtcatcaac

SEQ ID NO: 4944 - RNA, 22 nt, synthetic construct
  source 1..22: mol_type = other RNA
cctgttcacgctgtcagtgaaa

SEQ ID NO: 4945 - RNA, 22 nt, synthetic construct
  source 1..22: mol_type = other RNA
ccttaggcataggcagggccgg

SEQ ID NO: 4946 - RNA, 22 nt, synthetic construct
  source 1..22: mol_type = other RNA
ccttccagctctgactgtacgg

SEQ ID NO: 4947 - RNA, 22 nt, synthetic construct
  source 1..22: mol_type = other RNA
ccttctggcatcttctgcaggt

SEQ ID NO: 4948 - RNA, 22 nt, synthetic construct
  source 1..22: mol_type = other RNA
ccttggccccctctgcacttgc

SEQ ID NO: 4949 - RNA, 22 nt, synthetic construct
  source 1..22: mol_type = other RNA
ccttgtcatcaaccgtctggtg

SEQ ID NO: 4950 - RNA, 22 nt, synthetic construct
  source 1..22: mol_type = other RNA
ccttgtgcagcactatgtggcc

SEQ ID NO: 4951 - RNA, 22 nt, synthetic construct
  source 1..22: mol_type = other RNA
cctttccggatgtggtcagcct

SEQ ID NO: 4952 - RNA, 22 nt, synthetic construct
  source 1..22: mol_type = other RNA
cctttgtacgcagaagcagtgc

SEQ ID NO: 4953 - RNA, 22 nt, synthetic construct
  source 1..22: mol_type = other RNA
cgaagcgacagccccgatcctg

SEQ ID NO: 4954 - RNA, 22 nt, synthetic construct
  source 1..22: mol_type = other RNA
cgacaacacctgcagaagatgc

SEQ ID NO: 4955 - RNA, 22 nt, synthetic construct
  source 1..22: mol_type = other RNA
cgacagccccgatcctgctccc

SEQ ID NO: 4956 - RNA, 22 nt, synthetic construct
  source 1..22: mol_type = other RNA
cgacagtaccccttccagctct

SEQ ID NO: 4957 - RNA, 22 nt, synthetic construct
  source 1..22: mol_type = other RNA
cgacgtggactgcctgccactg

SEQ ID NO: 4958 - RNA, 22 nt, synthetic construct
  source 1..22: mol_type = other RNA
cgactacctccgacagtacccc

SEQ ID NO: 4959 - RNA, 22 nt, synthetic construct
  source 1..22: mol_type = other RNA
cgactccagcttccgtctggac

SEQ ID NO: 4960 - RNA, 22 nt, synthetic construct
  source 1..22: mol_type = other RNA
cgaggcccgacaacacctgcag

SEQ ID NO: 4961 - RNA, 22 nt, synthetic construct
  source 1..22: mol_type = other RNA
cgagtggttttcactgacagcg

SEQ ID NO: 4962 - RNA, 22 nt, synthetic construct
  source 1..22: mol_type = other RNA
cgatcctgctcccaccccggcc

SEQ ID NO: 4963 - RNA, 22 nt, synthetic construct
  source 1..22: mol_type = other RNA
cgcaccccagctacctgttcac

SEQ ID NO: 4964 - RNA, 22 nt, synthetic construct
  source 1..22: mol_type = other RNA
cgcagaagcagtgcccgcagcc

SEQ ID NO: 4965 - RNA, 22 nt, synthetic construct
  source 1..22: mol_type = other RNA
cgcagcctgcaacacctgtgcc

SEQ ID NO: 4966 - RNA, 22 nt, synthetic construct
  source 1..22: mol_type = other RNA
cgcatcctccttaggcataggc

SEQ ID NO: 4967 - RNA, 22 nt, synthetic construct
  source 1..22: mol_type = other RNA
cgcatcctggcctttccggatg

SEQ ID NO: 4968 - RNA, 22 nt, synthetic construct
  source 1..22: mol_type = other RNA
cgcatggccgactacctccgac

SEQ ID NO: 4969 - RNA, 22 nt, synthetic construct
  source 1..22: mol_type = other RNA
cgcattgagtatgccgactcca

SEQ ID NO: 4970 - RNA, 22 nt, synthetic construct
  source 1..22: mol_type = other RNA
cgccggggcagtggcaggcagt

SEQ ID NO: 4971 - RNA, 22 nt, synthetic construct
  source 1..22: mol_type = other RNA
cgcctagtgacccagcactgcc

SEQ ID NO: 4972 - RNA, 22 nt, synthetic construct
  source 1..22: mol_type = other RNA
cgccttgtcatcaaccgtctgg

SEQ ID NO: 4973 - RNA, 22 nt, synthetic construct
  source 1..22: mol_type = other RNA
cgctggccgtaatggaacccca

SEQ ID NO: 4974 - RNA, 22 nt, synthetic construct
  source 1..22: mol_type = other RNA
cgctgtcagtgaaaaccactcg

SEQ ID NO: 4975 - RNA, 22 nt, synthetic construct
  source 1..22: mol_type = other RNA
cgcttcgggtatcagcagtgca

SEQ ID NO: 4976 - RNA, 22 nt, synthetic construct
  source 1..22: mol_type = other RNA
cggaaaggccaggatgcgtggc

SEQ ID NO: 4977 - RNA, 22 nt, synthetic construct
  source 1..22: mol_type = other RNA
cggaagctggagtcggcatact

SEQ ID NO: 4978 - RNA, 22 nt, synthetic construct
  source 1..22: mol_type = other RNA
cggaggtagtcggccatgcgcc

SEQ ID NO: 4979 - RNA, 22 nt, synthetic construct
  source 1..22: mol_type = other RNA
cggatgtggtcagccttgtgca

SEQ ID NO: 4980 - RNA, 22 nt, synthetic construct
  source 1..22: mol_type = other RNA
cggcacaggtgttgcaggctgc

SEQ ID NO: 4981 - RNA, 22 nt, synthetic construct
  source 1..22: mol_type = other RNA
cggcatactcaatgcgtacatt

SEQ ID NO: 4982 - RNA, 22 nt, synthetic construct
  source 1..22: mol_type = other RNA
cggccaccagacggttgatgac

SEQ ID NO: 4983 - RNA, 22 nt, synthetic construct
  source 1..22: mol_type = other RNA
cggccagcgaggcccgacaaca

SEQ ID NO: 4984 - RNA, 22 nt, synthetic construct
  source 1..22: mol_type = other RNA
cggccctgcctatgcctaagga

SEQ ID NO: 4985 - RNA, 22 nt, synthetic construct
  source 1..22: mol_type = other RNA
cggcgcatggccgactacctcc

SEQ ID NO: 4986 - RNA, 22 nt, synthetic construct
  source 1..22: mol_type = other RNA
cgggcactgcttctgcgtacaa

SEQ ID NO: 4987 - RNA, 22 nt, synthetic construct
  source 1..22: mol_type = other RNA
cgggcctcgctggccgtaatgg

SEQ ID NO: 4988 - RNA, 22 nt, synthetic construct
  source 1..22: mol_type = other RNA
cggggcagtggcaggcagtcca

SEQ ID NO: 4989 - RNA, 22 nt, synthetic construct
  source 1..22: mol_type = other RNA
cggggctgtcgcttcgggtatc

SEQ ID NO: 4990 - RNA, 22 nt, synthetic construct
  source 1..22: mol_type = other RNA
cggggtgggagcaggatcgggg

SEQ ID NO: 4991 - RNA, 22 nt, synthetic construct
  source 1..22: mol_type = other RNA
cgggtatcagcagtgcaggagg

SEQ ID NO: 4992 - RNA, 22 nt, synthetic construct
  source 1..22: mol_type = other RNA
cggttgatgacaaggcggcaca

SEQ ID NO: 4993 - RNA, 22 nt, synthetic construct
  source 1..22: mol_type = other RNA
cgtaatggaaccccaataccag

SEQ ID NO: 4994 - RNA, 22 nt, synthetic construct
  source 1..22: mol_type = other RNA
cgtacaaagggctgcaccagtt

SEQ ID NO: 4995 - RNA, 22 nt, synthetic construct
  source 1..22: mol_type = other RNA
cgtacagtcagagctggaaggg

SEQ ID NO: 4996 - RNA, 22 nt, synthetic construct
  source 1..22: mol_type = other RNA
cgtacattggtggggccacgag

SEQ ID NO: 4997 - RNA, 22 nt, synthetic construct
  source 1..22: mol_type = other RNA
cgtactaagaacgtgccttctg

SEQ ID NO: 4998 - RNA, 22 nt, synthetic construct
  source 1..22: mol_type = other RNA
cgtcggccaccagacggttgat

SEQ ID NO: 4999 - RNA, 22 nt, synthetic construct
  source 1..22: mol_type = other RNA
cgtctggactccaactgcttgt

SEQ ID NO: 5000 - RNA, 22 nt, synthetic construct
  source 1..22: mol_type = other RNA
cgtctggtggccgacgtggact

SEQ ID NO: 5001 - RNA, 22 nt, synthetic construct
  source 1..22: mol_type = other RNA
cgtgaacaggtagctggggtgc

SEQ ID NO: 5002 - RNA, 22 nt, synthetic construct
  source 1..22: mol_type = other RNA
cgtgacagcacgcaccccagct

SEQ ID NO: 5003 - RNA, 22 nt, synthetic construct
  source 1..22: mol_type = other RNA
cgtgccttctggcatcttctgc

SEQ ID NO: 5004 - RNA, 22 nt, synthetic construct
  source 1..22: mol_type = other RNA
cgtgctgtcacgtactaagaac

SEQ ID NO: 5005 - RNA, 22 nt, synthetic construct
  source 1..22: mol_type = other RNA
cgtggactgcctgccactgccc

SEQ ID NO: 5006 - RNA, 22 nt, synthetic construct
  source 1..22: mol_type = other RNA
cgtggccccaccaatgtacgca

SEQ ID NO: 5007 - RNA, 22 nt, synthetic construct
  source 1..22: mol_type = other RNA
cgtggcctggacaagcagttgg

SEQ ID NO: 5008 - RNA, 22 nt, synthetic construct
  source 1..22: mol_type = other RNA
cgttcttagtacgtgacagcac

SEQ ID NO: 5009 - RNA, 22 nt, synthetic construct
  source 1..22: mol_type = other RNA
ctaaaactggtgcagccctttg

SEQ ID NO: 5010 - RNA, 22 nt, synthetic construct
  source 1..22: mol_type = other RNA
ctaagaacgtgccttctggcat

SEQ ID NO: 5011 - RNA, 22 nt, synthetic construct
  source 1..22: mol_type = other RNA
ctaaggaggatgcgcctagtga

SEQ ID NO: 5012 - RNA, 22 nt, synthetic construct
  source 1..22: mol_type = other RNA
ctacctccgacagtaccccttc

SEQ ID NO: 5013 - RNA, 22 nt, synthetic construct
  source 1..22: mol_type = other RNA
ctacctgttcacgctgtcagtg

SEQ ID NO: 5014 - RNA, 22 nt, synthetic construct
  source 1..22: mol_type = other RNA
ctaggcaagtgcagagggggcc

SEQ ID NO: 5015 - RNA, 22 nt, synthetic construct
  source 1..22: mol_type = other RNA
ctaggcgcatcctccttaggca

SEQ ID NO: 5016 - RNA, 22 nt, synthetic construct
  source 1..22: mol_type = other RNA
ctaggctggtattggggttcca

SEQ ID NO: 5017 - RNA, 22 nt, synthetic construct
  source 1..22: mol_type = other RNA
ctagtgacccagcactgcctgc

SEQ ID NO: 5018 - RNA, 22 nt, synthetic construct
  source 1..22: mol_type = other RNA
ctatgcctaaggaggatgcgcc

SEQ ID NO: 5019 - RNA, 22 nt, synthetic construct
  source 1..22: mol_type = other RNA
ctatgtggcctcctgcactgct

SEQ ID NO: 5020 - RNA, 22 nt, synthetic construct
  source 1..22: mol_type = other RNA
ctcaatgcgtacattggtgggg

SEQ ID NO: 5021 - RNA, 22 nt, synthetic construct
  source 1..22: mol_type = other RNA
ctccaactgcttgtccaggcca

SEQ ID NO: 5022 - RNA, 22 nt, synthetic construct
  source 1..22: mol_type = other RNA
ctccaccagccactgctgtaca

SEQ ID NO: 5023 - RNA, 22 nt, synthetic construct
  source 1..22: mol_type = other RNA
ctccagcttccgtctggactcc

SEQ ID NO: 5024 - RNA, 22 nt, synthetic construct
  source 1..22: mol_type = other RNA
ctcccaccccggccctgcctat

SEQ ID NO: 5025 - RNA, 22 nt, synthetic construct
  source 1..22: mol_type = other RNA
ctccgacagtaccccttccagc

SEQ ID NO: 5026 - RNA, 22 nt, synthetic construct
  source 1..22: mol_type = other RNA
ctcctccaccagccactgctgt

SEQ ID NO: 5027 - RNA, 22 nt, synthetic construct
  source 1..22: mol_type = other RNA
ctcctgcactgctgatacccga

SEQ ID NO: 5028 - RNA, 22 nt, synthetic construct
  source 1..22: mol_type = other RNA
ctccttaggcataggcagggcc

SEQ ID NO: 5029 - RNA, 22 nt, synthetic construct
  source 1..22: mol_type = other RNA
ctcgctggccgtaatggaaccc

SEQ ID NO: 5030 - RNA, 22 nt, synthetic construct
  source 1..22: mol_type = other RNA
ctcgtggccccaccaatgtacg

SEQ ID NO: 5031 - RNA, 22 nt, synthetic construct
  source 1..22: mol_type = other RNA
ctctgactgtacggggcaatct

SEQ ID NO: 5032 - RNA, 22 nt, synthetic construct
  source 1..22: mol_type = other RNA
ctctgcacttgcctaggctggt

SEQ ID NO: 5033 - RNA, 22 nt, synthetic construct
  source 1..22: mol_type = other RNA
ctgacagcgtgaacaggtagct

SEQ ID NO: 5034 - RNA, 22 nt, synthetic construct
  source 1..22: mol_type = other RNA
ctgaccacatccggaaaggcca

SEQ ID NO: 5035 - RNA, 22 nt, synthetic construct
  source 1..22: mol_type = other RNA
ctgactgtacggggcaatctgc

SEQ ID NO: 5036 - RNA, 22 nt, synthetic construct
  source 1..22: mol_type = other RNA
ctgatacccgaagcgacagccc

SEQ ID NO: 5037 - RNA, 22 nt, synthetic construct
  source 1..22: mol_type = other RNA
ctgcaacacctgtgccgccttg

SEQ ID NO: 5038 - RNA, 22 nt, synthetic construct
  source 1..22: mol_type = other RNA
ctgcacaaggctgaccacatcc

SEQ ID NO: 5039 - RNA, 22 nt, synthetic construct
  source 1..22: mol_type = other RNA
ctgcaccagttttaggtgtaca

SEQ ID NO: 5040 - RNA, 22 nt, synthetic construct
  source 1..22: mol_type = other RNA
ctgcactgctgatacccgaagc

SEQ ID NO: 5041 - RNA, 22 nt, synthetic construct
  source 1..22: mol_type = other RNA
ctgcacttgcctaggctggtat

SEQ ID NO: 5042 - RNA, 22 nt, synthetic construct
  source 1..22: mol_type = other RNA
ctgcagaagatgccagaaggca

SEQ ID NO: 5043 - RNA, 22 nt, synthetic construct
  source 1..22: mol_type = other RNA
ctgcaggtgttgtcgggcctcg

SEQ ID NO: 5044 - RNA, 22 nt, synthetic construct
  source 1..22: mol_type = other RNA
ctgccactgccccggcgcatgg

SEQ ID NO: 5045 - RNA, 22 nt, synthetic construct
  source 1..22: mol_type = other RNA
ctgccccggcgcatggccgact

SEQ ID NO: 5046 - RNA, 22 nt, synthetic construct
  source 1..22: mol_type = other RNA
ctgcctatgcctaaggaggatg

SEQ ID NO: 5047 - RNA, 22 nt, synthetic construct
  source 1..22: mol_type = other RNA
ctgcctgctcctccaccagcca

SEQ ID NO: 5048 - RNA, 22 nt, synthetic construct
  source 1..22: mol_type = other RNA
ctgcgggcactgcttctgcgta

SEQ ID NO: 5049 - RNA, 22 nt, synthetic construct
  source 1..22: mol_type = other RNA
ctgcgtacaaagggctgcacca

SEQ ID NO: 5050 - RNA, 22 nt, synthetic construct
  source 1..22: mol_type = other RNA
ctgctcctccaccagccactgc

SEQ ID NO: 5051 - RNA, 22 nt, synthetic construct
  source 1..22: mol_type = other RNA
ctgctgatacccgaagcgacag

SEQ ID NO: 5052 - RNA, 22 nt, synthetic construct
  source 1..22: mol_type = other RNA
ctgctgtacacctaaaactggt

SEQ ID NO: 5053 - RNA, 22 nt, synthetic construct
  source 1..22: mol_type = other RNA
ctgcttctgcgtacaaagggct

SEQ ID NO: 5054 - RNA, 22 nt, synthetic construct
  source 1..22: mol_type = other RNA
ctgcttgtccaggccacgcatc

SEQ ID NO: 5055 - RNA, 22 nt, synthetic construct
  source 1..22: mol_type = other RNA
ctggaaggggtactgtcggagg

SEQ ID NO: 5056 - RNA, 22 nt, synthetic construct
  source 1..22: mol_type = other RNA
ctggacaagcagttggagtcca

SEQ ID NO: 5057 - RNA, 22 nt, synthetic construct
  source 1..22: mol_type = other RNA
ctggactccaactgcttgtcca

SEQ ID NO: 5058 - RNA, 22 nt, synthetic construct
  source 1..22: mol_type = other RNA
ctggagtcggcatactcaatgc

SEQ ID NO: 5059 - RNA, 22 nt, synthetic construct
  source 1..22: mol_type = other RNA
ctggcatcttctgcaggtgttg

SEQ ID NO: 5060 - RNA, 22 nt, synthetic construct
  source 1..22: mol_type = other RNA
ctggccgtaatggaaccccaat

SEQ ID NO: 5061 - RNA, 22 nt, synthetic construct
  source 1..22: mol_type = other RNA
ctggcctttccggatgtggtca

SEQ ID NO: 5062 - RNA, 22 nt, synthetic construct
  source 1..22: mol_type = other RNA
ctggggtgcgtgctgtcacgta

SEQ ID NO: 5063 - RNA, 22 nt, synthetic construct
  source 1..22: mol_type = other RNA
ctgggtcactaggcgcatcctc

SEQ ID NO: 5064 - RNA, 22 nt, synthetic construct
  source 1..22: mol_type = other RNA
ctgggtgagggtgggcagattg

SEQ ID NO: 5065 - RNA, 22 nt, synthetic construct
  source 1..22: mol_type = other RNA
ctggtattggggttccattacg

SEQ ID NO: 5066 - RNA, 22 nt, synthetic construct
  source 1..22: mol_type = other RNA
ctggtgcagccctttgtacgca

SEQ ID NO: 5067 - RNA, 22 nt, synthetic construct
  source 1..22: mol_type = other RNA
ctggtggaggagcaggcagtgc

SEQ ID NO: 5068 - RNA, 22 nt, synthetic construct
  source 1..22: mol_type = other RNA
ctggtggccgacgtggactgcc

SEQ ID NO: 5069 - RNA, 22 nt, synthetic construct
  source 1..22: mol_type = other RNA
ctgtacacctaaaactggtgca

SEQ ID NO: 5070 - RNA, 22 nt, synthetic construct
  source 1..22: mol_type = other RNA
ctgtacggggcaatctgcccac

SEQ ID NO: 5071 - RNA, 22 nt, synthetic construct
  source 1..22: mol_type = other RNA
ctgtcacgtactaagaacgtgc

SEQ ID NO: 5072 - RNA, 22 nt, synthetic construct
  source 1..22: mol_type = other RNA
ctgtcagtgaaaaccactcgtg

SEQ ID NO: 5073 - RNA, 22 nt, synthetic construct
  source 1..22: mol_type = other RNA
ctgtcgcttcgggtatcagcag

SEQ ID NO: 5074 - RNA, 22 nt, synthetic construct
  source 1..22: mol_type = other RNA
ctgtcggaggtagtcggccatg

SEQ ID NO: 5075 - RNA, 22 nt, synthetic construct
  source 1..22: mol_type = other RNA
ctgtgccgccttgtcatcaacc

SEQ ID NO: 5076 - RNA, 22 nt, synthetic construct
  source 1..22: mol_type = other RNA
ctgttcacgctgtcagtgaaaa

SEQ ID NO: 5077 - RNA, 22 nt, synthetic construct
  source 1..22: mol_type = other RNA
cttaggcataggcagggccggg

SEQ ID NO: 5078 - RNA, 22 nt, synthetic construct
  source 1..22: mol_type = other RNA
cttagtacgtgacagcacgcac

SEQ ID NO: 5079 - RNA, 22 nt, synthetic construct
  source 1..22: mol_type = other RNA
cttccagctctgactgtacggg

SEQ ID NO: 5080 - RNA, 22 nt, synthetic construct
  source 1..22: mol_type = other RNA
cttccgtctggactccaactgc

SEQ ID NO: 5081 - RNA, 22 nt, synthetic construct
  source 1..22: mol_type = other RNA
cttcgggtatcagcagtgcagg

SEQ ID NO: 5082 - RNA, 22 nt, synthetic construct
  source 1..22: mol_type = other RNA
cttctgcaggtgttgtcgggcc

SEQ ID NO: 5083 - RNA, 22 nt, synthetic construct
  source 1..22: mol_type = other RNA
cttctgcgtacaaagggctgca

SEQ ID NO: 5084 - RNA, 22 nt, synthetic construct
  source 1..22: mol_type = other RNA
cttctggcatcttctgcaggtg

SEQ ID NO: 5085 - RNA, 22 nt, synthetic construct
  source 1..22: mol_type = other RNA
cttgcctaggctggtattgggg

SEQ ID NO: 5086 - RNA, 22 nt, synthetic construct
  source 1..22: mol_type = other RNA
cttggccccctctgcacttgcc

SEQ ID NO: 5087 - RNA, 22 nt, synthetic construct
  source 1..22: mol_type = other RNA
cttgtcatcaaccgtctggtgg

SEQ ID NO: 5088 - RNA, 22 nt, synthetic construct
  source 1..22: mol_type = other RNA
cttgtccaggccacgcatcctg

SEQ ID NO: 5089 - RNA, 22 nt, synthetic construct
  source 1..22: mol_type = other RNA
cttgtgcagcactatgtggcct

SEQ ID NO: 5090 - RNA, 22 nt, synthetic construct
  source 1..22: mol_type = other RNA
ctttccggatgtggtcagcctt

SEQ ID NO: 5091 - RNA, 22 nt, synthetic construct
  source 1..22: mol_type = other RNA
ctttgtacgcagaagcagtgcc

SEQ ID NO: 5092 - RNA, 22 nt, synthetic construct
  source 1..22: mol_type = other RNA
gaaaaccactcgtggccccacc

SEQ ID NO: 5093 - RNA, 22 nt, synthetic construct
  source 1..22: mol_type = other RNA
gaaaggccaggatgcgtggcct

SEQ ID NO: 5094 - RNA, 22 nt, synthetic construct
  source 1..22: mol_type = other RNA
gaacaggtagctggggtgcgtg

SEQ ID NO: 5095 - RNA, 22 nt, synthetic construct
  source 1..22: mol_type = other RNA
gaaccccaataccagcctaggc

SEQ ID NO: 5096 - RNA, 22 nt, synthetic construct
  source 1..22: mol_type = other RNA
gaacgtgccttctggcatcttc

SEQ ID NO: 5097 - RNA, 22 nt, synthetic construct
  source 1..22: mol_type = other RNA
gaagatgccagaaggcacgttc

SEQ ID NO: 5098 - RNA, 22 nt, synthetic construct
  source 1..22: mol_type = other RNA
gaagcagtgcccgcagcctgca

SEQ ID NO: 5099 - RNA, 22 nt, synthetic construct
  source 1..22: mol_type = other RNA
gaagcgacagccccgatcctgc

SEQ ID NO: 5100 - RNA, 22 nt, synthetic construct
  source 1..22: mol_type = other RNA
gaagctggagtcggcatactca

SEQ ID NO: 5101 - RNA, 22 nt, synthetic construct
  source 1..22: mol_type = other RNA
gaaggcacgttcttagtacgtg

SEQ ID NO: 5102 - RNA, 22 nt, synthetic construct
  source 1..22: mol_type = other RNA
gaaggggtactgtcggaggtag

SEQ ID NO: 5103 - RNA, 22 nt, synthetic construct
  source 1..22: mol_type = other RNA
gacaacacctgcagaagatgcc

SEQ ID NO: 5104 - RNA, 22 nt, synthetic construct
  source 1..22: mol_type = other RNA
gacaagcagttggagtccagac

SEQ ID NO: 5105 - RNA, 22 nt, synthetic construct
  source 1..22: mol_type = other RNA
gacaaggcggcacaggtgttgc

SEQ ID NO: 5106 - RNA, 22 nt, synthetic construct
  source 1..22: mol_type = other RNA
gacagcacgcaccccagctacc

SEQ ID NO: 5107 - RNA, 22 nt, synthetic construct
  source 1..22: mol_type = other RNA
gacagccccgatcctgctccca

SEQ ID NO: 5108 - RNA, 22 nt, synthetic construct
  source 1..22: mol_type = other RNA
gacagcgtgaacaggtagctgg

SEQ ID NO: 5109 - RNA, 22 nt, synthetic construct
  source 1..22: mol_type = other RNA
gacagtaccccttccagctctg

SEQ ID NO: 5110 - RNA, 22 nt, synthetic construct
  source 1..22: mol_type = other RNA
gaccacatccggaaaggccagg

SEQ ID NO: 5111 - RNA, 22 nt, synthetic construct
  source 1..22: mol_type = other RNA
gacccagcactgcctgctcctc

SEQ ID NO: 5112 - RNA, 22 nt, synthetic construct
  source 1..22: mol_type = other RNA
gacggaagctggagtcggcata

SEQ ID NO: 5113 - RNA, 22 nt, synthetic construct
  source 1..22: mol_type = other RNA
gacggttgatgacaaggcggca

SEQ ID NO: 5114 - RNA, 22 nt, synthetic construct
  source 1..22: mol_type = other RNA
gacgtggactgcctgccactgc

SEQ ID NO: 5115 - RNA, 22 nt, synthetic construct
  source 1..22: mol_type = other RNA
gactacctccgacagtacccct

SEQ ID NO: 5116 - RNA, 22 nt, synthetic construct
  source 1..22: mol_type = other RNA
gactccaactgcttgtccaggc

SEQ ID NO: 5117 - RNA, 22 nt, synthetic construct
  source 1..22: mol_type = other RNA
gactccagcttccgtctggact

SEQ ID NO: 5118 - RNA, 22 nt, synthetic construct
  source 1..22: mol_type = other RNA
gactgcctgccactgccccggc

SEQ ID NO: 5119 - RNA, 22 nt, synthetic construct
  source 1..22: mol_type = other RNA
gactgtacggggcaatctgccc

SEQ ID NO: 5120 - RNA, 22 nt, synthetic construct
  source 1..22: mol_type = other RNA
gagcaggatcggggctgtcgct

SEQ ID NO: 5121 - RNA, 22 nt, synthetic construct
  source 1..22: mol_type = other RNA
gagcaggcagtgctgggtcact

SEQ ID NO: 5122 - RNA, 22 nt, synthetic construct
  source 1..22: mol_type = other RNA
gagctggaaggggtactgtcgg

SEQ ID NO: 5123 - RNA, 22 nt, synthetic construct
  source 1..22: mol_type = other RNA
gaggagcaggcagtgctgggtc

SEQ ID NO: 5124 - RNA, 22 nt, synthetic construct
  source 1..22: mol_type = other RNA
gaggatgcgcctagtgacccag

SEQ ID NO: 5125 - RNA, 22 nt, synthetic construct
  source 1..22: mol_type = other RNA
gaggccacatagtgctgcacaa

SEQ ID NO: 5126 - RNA, 22 nt, synthetic construct
  source 1..22: mol_type = other RNA
gaggcccgacaacacctgcaga

SEQ ID NO: 5127 - RNA, 22 nt, synthetic construct
  source 1..22: mol_type = other RNA
gagggtgggcagattgccccgt

SEQ ID NO: 5128 - RNA, 22 nt, synthetic construct
  source 1..22: mol_type = other RNA
gaggtagtcggccatgcgccgg

SEQ ID NO: 5129 - RNA, 22 nt, synthetic construct
  source 1..22: mol_type = other RNA
gagtatgccgactccagcttcc

SEQ ID NO: 5130 - RNA, 22 nt, synthetic construct
  source 1..22: mol_type = other RNA
gagtccagacggaagctggagt

SEQ ID NO: 5131 - RNA, 22 nt, synthetic construct
  source 1..22: mol_type = other RNA
gagtcggcatactcaatgcgta

SEQ ID NO: 5132 - RNA, 22 nt, synthetic construct
  source 1..22: mol_type = other RNA
gagtggttttcactgacagcgt

SEQ ID NO: 5133 - RNA, 22 nt, synthetic construct
  source 1..22: mol_type = other RNA
gatacccgaagcgacagccccg

SEQ ID NO: 5134 - RNA, 22 nt, synthetic construct
  source 1..22: mol_type = other RNA
gatcctgctcccaccccggccc

SEQ ID NO: 5135 - RNA, 22 nt, synthetic construct
  source 1..22: mol_type = other RNA
gatcggggctgtcgcttcgggt

SEQ ID NO: 5136 - RNA, 22 nt, synthetic construct
  source 1..22: mol_type = other RNA
gatgacaaggcggcacaggtgt

SEQ ID NO: 5137 - RNA, 22 nt, synthetic construct
  source 1..22: mol_type = other RNA
gatgccagaaggcacgttctta

SEQ ID NO: 5138 - RNA, 22 nt, synthetic construct
  source 1..22: mol_type = other RNA
gatgcgcctagtgacccagcac

SEQ ID NO: 5139 - RNA, 22 nt, synthetic construct
  source 1..22: mol_type = other RNA
gatgcgtggcctggacaagcag

SEQ ID NO: 5140 - RNA, 22 nt, synthetic construct
  source 1..22: mol_type = other RNA
gatgtggtcagccttgtgcagc

SEQ ID NO: 5141 - RNA, 22 nt, synthetic construct
  source 1..22: mol_type = other RNA
gattgccccgtacagtcagagc

SEQ ID NO: 5142 - RNA, 22 nt, synthetic construct
  source 1..22: mol_type = other RNA
gcaacacctgtgccgccttgtc

SEQ ID NO: 5143 - RNA, 22 nt, synthetic construct
  source 1..22: mol_type = other RNA
gcacaaggctgaccacatccgg

SEQ ID NO: 5144 - RNA, 22 nt, synthetic construct
  source 1..22: mol_type = other RNA
gcacaggtgttgcaggctgcgg

SEQ ID NO: 5145 - RNA, 22 nt, synthetic construct
  source 1..22: mol_type = other RNA
gcaccagttttaggtgtacagc

SEQ ID NO: 5146 - RNA, 22 nt, synthetic construct
  source 1..22: mol_type = other RNA
gcaccccagctacctgttcacg

SEQ ID NO: 5147 - RNA, 22 nt, synthetic construct
  source 1..22: mol_type = other RNA
gcacgcaccccagctacctgtt

SEQ ID NO: 5148 - RNA, 22 nt, synthetic construct
  source 1..22: mol_type = other RNA
gcacgttcttagtacgtgacag

SEQ ID NO: 5149 - RNA, 22 nt, synthetic construct
  source 1..22: mol_type = other RNA
gcactatgtggcctcctgcact

SEQ ID NO: 5150 - RNA, 22 nt, synthetic construct
  source 1..22: mol_type = other RNA
gcactgcctgctcctccaccag

SEQ ID NO: 5151 - RNA, 22 nt, synthetic construct
  source 1..22: mol_type = other RNA
gcactgctgatacccgaagcga

SEQ ID NO: 5152 - RNA, 22 nt, synthetic construct
  source 1..22: mol_type = other RNA
gcactgcttctgcgtacaaagg

SEQ ID NO: 5153 - RNA, 22 nt, synthetic construct
  source 1..22: mol_type = other RNA
gcacttgcctaggctggtattg

SEQ ID NO: 5154 - RNA, 22 nt, synthetic construct
  source 1..22: mol_type = other RNA
gcagaagatgccagaaggcacg

SEQ ID NO: 5155 - RNA, 22 nt, synthetic construct
  source 1..22: mol_type = other RNA
gcagaagcagtgcccgcagcct

SEQ ID NO: 5156 - RNA, 22 nt, synthetic construct
  source 1..22: mol_type = other RNA
gcagattgccccgtacagtcag

SEQ ID NO: 5157 - RNA, 22 nt, synthetic construct
  source 1..22: mol_type = other RNA
gcagcactatgtggcctcctgc

SEQ ID NO: 5158 - RNA, 22 nt, synthetic construct
  source 1..22: mol_type = other RNA
gcagccctttgtacgcagaagc

SEQ ID NO: 5159 - RNA, 22 nt, synthetic construct
  source 1..22: mol_type = other RNA
gcagcctgcaacacctgtgccg

SEQ ID NO: 5160 - RNA, 22 nt, synthetic construct
  source 1..22: mol_type = other RNA
gcaggaggccacatagtgctgc

SEQ ID NO: 5161 - RNA, 22 nt, synthetic construct
  source 1..22: mol_type = other RNA
gcaggatcggggctgtcgcttc

SEQ ID NO: 5162 - RNA, 22 nt, synthetic construct
  source 1..22: mol_type = other RNA
gcaggcagtccacgtcggccac

SEQ ID NO: 5163 - RNA, 22 nt, synthetic construct
  source 1..22: mol_type = other RNA
gcaggcagtgctgggtcactag

SEQ ID NO: 5164 - RNA, 22 nt, synthetic construct
  source 1..22: mol_type = other RNA
gcaggctgcgggcactgcttct

SEQ ID NO: 5165 - RNA, 22 nt, synthetic construct
  source 1..22: mol_type = other RNA
gcaggtgttgtcgggcctcgct

SEQ ID NO: 5166 - RNA, 22 nt, synthetic construct
  source 1..22: mol_type = other RNA
gcagtccacgtcggccaccaga

SEQ ID NO: 5167 - RNA, 22 nt, synthetic construct
  source 1..22: mol_type = other RNA
gcagtgcaggaggccacatagt

SEQ ID NO: 5168 - RNA, 22 nt, synthetic construct
  source 1..22: mol_type = other RNA
gcagtgcccgcagcctgcaaca

SEQ ID NO: 5169 - RNA, 22 nt, synthetic construct
  source 1..22: mol_type = other RNA
gcagtgctgggtcactaggcgc

SEQ ID NO: 5170 - RNA, 22 nt, synthetic construct
  source 1..22: mol_type = other RNA
gcagtggcaggcagtccacgtc

SEQ ID NO: 5171 - RNA, 22 nt, synthetic construct
  source 1..22: mol_type = other RNA
gcagtggctggtggaggagcag

SEQ ID NO: 5172 - RNA, 22 nt, synthetic construct
  source 1..22: mol_type = other RNA
gcagttggagtccagacggaag

SEQ ID NO: 5173 - RNA, 22 nt, synthetic construct
  source 1..22: mol_type = other RNA
gcatactcaatgcgtacattgg

SEQ ID NO: 5174 - RNA, 22 nt, synthetic construct
  source 1..22: mol_type = other RNA
gcataggcagggccggggtggg

SEQ ID NO: 5175 - RNA, 22 nt, synthetic construct
  source 1..22: mol_type = other RNA
gcatcctccttaggcataggca

SEQ ID NO: 5176 - RNA, 22 nt, synthetic construct
  source 1..22: mol_type = other RNA
gcatcctggcctttccggatgt

SEQ ID NO: 5177 - RNA, 22 nt, synthetic construct
  source 1..22: mol_type = other RNA
gcatcttctgcaggtgttgtcg

SEQ ID NO: 5178 - RNA, 22 nt, synthetic construct
  source 1..22: mol_type = other RNA
gcatggccgactacctccgaca

SEQ ID NO: 5179 - RNA, 22 nt, synthetic construct
  source 1..22: mol_type = other RNA
gcattgagtatgccgactccag

SEQ ID NO: 5180 - RNA, 22 nt, synthetic construct
  source 1..22: mol_type = other RNA
gccacatagtgctgcacaaggc

SEQ ID NO: 5181 - RNA, 22 nt, synthetic construct
  source 1..22: mol_type = other RNA
gccaccagacggttgatgacaa

SEQ ID NO: 5182 - RNA, 22 nt, synthetic construct
  source 1..22: mol_type = other RNA
gccacgagtggttttcactgac

SEQ ID NO: 5183 - RNA, 22 nt, synthetic construct
  source 1..22: mol_type = other RNA
gccacgcatcctggcctttccg

SEQ ID NO: 5184 - RNA, 22 nt, synthetic construct
  source 1..22: mol_type = other RNA
gccactgctgtacacctaaaac

SEQ ID NO: 5185 - RNA, 22 nt, synthetic construct
  source 1..22: mol_type = other RNA
gccagaaggcacgttcttagta

SEQ ID NO: 5186 - RNA, 22 nt, synthetic construct
  source 1..22: mol_type = other RNA
gccagcgaggcccgacaacacc

SEQ ID NO: 5187 - RNA, 22 nt, synthetic construct
  source 1..22: mol_type = other RNA
gccaggatgcgtggcctggaca

SEQ ID NO: 5188 - RNA, 22 nt, synthetic construct
  source 1..22: mol_type = other RNA
gccatgcgccggggcagtggca

SEQ ID NO: 5189 - RNA, 22 nt, synthetic construct
  source 1..22: mol_type = other RNA
gccccaccaatgtacgcattga

SEQ ID NO: 5190 - RNA, 22 nt, synthetic construct
  source 1..22: mol_type = other RNA
gccccctctgcacttgcctagg

SEQ ID NO: 5191 - RNA, 22 nt, synthetic construct
  source 1..22: mol_type = other RNA
gccccgatcctgctcccacccc

SEQ ID NO: 5192 - RNA, 22 nt, synthetic construct
  source 1..22: mol_type = other RNA
gccccggcgcatggccgactac

SEQ ID NO: 5193 - RNA, 22 nt, synthetic construct
  source 1..22: mol_type = other RNA
gccccgtacagtcagagctgga

SEQ ID NO: 5194 - RNA, 22 nt, synthetic construct
  source 1..22: mol_type = other RNA
gcccgacaacacctgcagaaga

SEQ ID NO: 5195 - RNA, 22 nt, synthetic construct
  source 1..22: mol_type = other RNA
gcccgcagcctgcaacacctgt

SEQ ID NO: 5196 - RNA, 22 nt, synthetic construct
  source 1..22: mol_type = other RNA
gccctgcctatgcctaaggagg

SEQ ID NO: 5197 - RNA, 22 nt, synthetic construct
  source 1..22: mol_type = other RNA
gccctttgtacgcagaagcagt

SEQ ID NO: 5198 - RNA, 22 nt, synthetic construct
  source 1..22: mol_type = other RNA
gccgacgtggactgcctgccac

SEQ ID NO: 5199 - RNA, 22 nt, synthetic construct
  source 1..22: mol_type = other RNA
gccgactacctccgacagtacc

SEQ ID NO: 5200 - RNA, 22 nt, synthetic construct
  source 1..22: mol_type = other RNA
gccgactccagcttccgtctgg

SEQ ID NO: 5201 - RNA, 22 nt, synthetic construct
  source 1..22: mol_type = other RNA
gccgccttgtcatcaaccgtct

SEQ ID NO: 5202 - RNA, 22 nt, synthetic construct
  source 1..22: mol_type = other RNA
gccggggcagtggcaggcagtc

SEQ ID NO: 5203 - RNA, 22 nt, synthetic construct
  source 1..22: mol_type = other RNA
gccggggtgggagcaggatcgg

SEQ ID NO: 5204 - RNA, 22 nt, synthetic construct
  source 1..22: mol_type = other RNA
gccgtaatggaaccccaatacc

SEQ ID NO: 5205 - RNA, 22 nt, synthetic construct
  source 1..22: mol_type = other RNA
gcctaaggaggatgcgcctagt

SEQ ID NO: 5206 - RNA, 22 nt, synthetic construct
  source 1..22: mol_type = other RNA
gcctaggcaagtgcagaggggg

SEQ ID NO: 5207 - RNA, 22 nt, synthetic construct
  source 1..22: mol_type = other RNA
gcctaggctggtattggggttc

SEQ ID NO: 5208 - RNA, 22 nt, synthetic construct
  source 1..22: mol_type = other RNA
gcctagtgacccagcactgcct

SEQ ID NO: 5209 - RNA, 22 nt, synthetic construct
  source 1..22: mol_type = other RNA
gcctatgcctaaggaggatgcg

SEQ ID NO: 5210 - RNA, 22 nt, synthetic construct
  source 1..22: mol_type = other RNA
gcctcctgcactgctgataccc

SEQ ID NO: 5211 - RNA, 22 nt, synthetic construct
  source 1..22: mol_type = other RNA
gcctcgctggccgtaatggaac

SEQ ID NO: 5212 - RNA, 22 nt, synthetic construct
  source 1..22: mol_type = other RNA
gcctgcaacacctgtgccgcct

SEQ ID NO: 5213 - RNA, 22 nt, synthetic construct
  source 1..22: mol_type = other RNA
gcctgccactgccccggcgcat

SEQ ID NO: 5214 - RNA, 22 nt, synthetic construct
  source 1..22: mol_type = other RNA
gcctgctcctccaccagccact

SEQ ID NO: 5215 - RNA, 22 nt, synthetic construct
  source 1..22: mol_type = other RNA
gcctggacaagcagttggagtc

SEQ ID NO: 5216 - RNA, 22 nt, synthetic construct
  source 1..22: mol_type = other RNA
gccttctggcatcttctgcagg

SEQ ID NO: 5217 - RNA, 22 nt, synthetic construct
  source 1..22: mol_type = other RNA
gccttgtcatcaaccgtctggt

SEQ ID NO: 5218 - RNA, 22 nt, synthetic construct
  source 1..22: mol_type = other RNA
gccttgtgcagcactatgtggc

SEQ ID NO: 5219 - RNA, 22 nt, synthetic construct
  source 1..22: mol_type = other RNA
gcctttccggatgtggtcagcc

SEQ ID NO: 5220 - RNA, 22 nt, synthetic construct
  source 1..22: mol_type = other RNA
gcgacagccccgatcctgctcc

SEQ ID NO: 5221 - RNA, 22 nt, synthetic construct
  source 1..22: mol_type = other RNA
gcgaggcccgacaacacctgca

SEQ ID NO: 5222 - RNA, 22 nt, synthetic construct
  source 1..22: mol_type = other RNA
gcgcatcctccttaggcatagg

SEQ ID NO: 5223 - RNA, 22 nt, synthetic construct
  source 1..22: mol_type = other RNA
gcgcatggccgactacctccga

SEQ ID NO: 5224 - RNA, 22 nt, synthetic construct
  source 1..22: mol_type = other RNA
gcgcctagtgacccagcactgc

SEQ ID NO: 5225 - RNA, 22 nt, synthetic construct
  source 1..22: mol_type = other RNA
gcggcacaggtgttgcaggctg

SEQ ID NO: 5226 - RNA, 22 nt, synthetic construct
  source 1..22: mol_type = other RNA
gcgggcactgcttctgcgtaca

SEQ ID NO: 5227 - RNA, 22 nt, synthetic construct
  source 1..22: mol_type = other RNA
gcgtacaaagggctgcaccagt

SEQ ID NO: 5228 - RNA, 22 nt, synthetic construct
  source 1..22: mol_type = other RNA
gcgtacattggtggggccacga

SEQ ID NO: 5229 - RNA, 22 nt, synthetic construct
  source 1..22: mol_type = other RNA
gcgtgaacaggtagctggggtg

SEQ ID NO: 5230 - RNA, 22 nt, synthetic construct
  source 1..22: mol_type = other RNA
gcgtgctgtcacgtactaagaa

SEQ ID NO: 5231 - RNA, 22 nt, synthetic construct
  source 1..22: mol_type = other RNA
gcgtggcctggacaagcagttg

SEQ ID NO: 5232 - RNA, 22 nt, synthetic construct
  source 1..22: mol_type = other RNA
gctacctgttcacgctgtcagt

SEQ ID NO: 5233 - RNA, 22 nt, synthetic construct
  source 1..22: mol_type = other RNA
gctcccaccccggccctgccta

SEQ ID NO: 5234 - RNA, 22 nt, synthetic construct
  source 1..22: mol_type = other RNA
gctcctccaccagccactgctg

SEQ ID NO: 5235 - RNA, 22 nt, synthetic construct
  source 1..22: mol_type = other RNA
gctctgactgtacggggcaatc

SEQ ID NO: 5236 - RNA, 22 nt, synthetic construct
  source 1..22: mol_type = other RNA
gctgaccacatccggaaaggcc

SEQ ID NO: 5237 - RNA, 22 nt, synthetic construct
  source 1..22: mol_type = other RNA
gctgatacccgaagcgacagcc

SEQ ID NO: 5238 - RNA, 22 nt, synthetic construct
  source 1..22: mol_type = other RNA
gctgcacaaggctgaccacatc

SEQ ID NO: 5239 - RNA, 22 nt, synthetic construct
  source 1..22: mol_type = other RNA
gctgcaccagttttaggtgtac

SEQ ID NO: 5240 - RNA, 22 nt, synthetic construct
  source 1..22: mol_type = other RNA
gctgcgggcactgcttctgcgt

SEQ ID NO: 5241 - RNA, 22 nt, synthetic construct
  source 1..22: mol_type = other RNA
gctggaaggggtactgtcggag

SEQ ID NO: 5242 - RNA, 22 nt, synthetic construct
  source 1..22: mol_type = other RNA
gctggagtcggcatactcaatg

SEQ ID NO: 5243 - RNA, 22 nt, synthetic construct
  source 1..22: mol_type = other RNA
gctggccgtaatggaaccccaa

SEQ ID NO: 5244 - RNA, 22 nt, synthetic construct
  source 1..22: mol_type = other RNA
gctggggtgcgtgctgtcacgt

SEQ ID NO: 5245 - RNA, 22 nt, synthetic construct
  source 1..22: mol_type = other RNA
gctgggtcactaggcgcatcct

SEQ ID NO: 5246 - RNA, 22 nt, synthetic construct
  source 1..22: mol_type = other RNA
gctggtattggggttccattac

SEQ ID NO: 5247 - RNA, 22 nt, synthetic construct
  source 1..22: mol_type = other RNA
gctggtggaggagcaggcagtg

SEQ ID NO: 5248 - RNA, 22 nt, synthetic construct
  source 1..22: mol_type = other RNA
gctgtacacctaaaactggtgc

SEQ ID NO: 5249 - RNA, 22 nt, synthetic construct
  source 1..22: mol_type = other RNA
gctgtcacgtactaagaacgtg

SEQ ID NO: 5250 - RNA, 22 nt, synthetic construct
  source 1..22: mol_type = other RNA
gctgtcagtgaaaaccactcgt

SEQ ID NO: 5251 - RNA, 22 nt, synthetic construct
  source 1..22: mol_type = other RNA
gctgtcgcttcgggtatcagca

SEQ ID NO: 5252 - RNA, 22 nt, synthetic construct
  source 1..22: mol_type = other RNA
gcttccgtctggactccaactg

SEQ ID NO: 5253 - RNA, 22 nt, synthetic construct
  source 1..22: mol_type = other RNA
gcttcgggtatcagcagtgcag

SEQ ID NO: 5254 - RNA, 22 nt, synthetic construct
  source 1..22: mol_type = other RNA
gcttctgcgtacaaagggctgc

SEQ ID NO: 5255 - RNA, 22 nt, synthetic construct
  source 1..22: mol_type = other RNA
gcttgtccaggccacgcatcct

SEQ ID NO: 5256 - RNA, 22 nt, synthetic construct
  source 1..22: mol_type = other RNA
ggaaaggccaggatgcgtggcc

SEQ ID NO: 5257 - RNA, 22 nt, synthetic construct
  source 1..22: mol_type = other RNA
ggaaccccaataccagcctagg

SEQ ID NO: 5258 - RNA, 22 nt, synthetic construct
  source 1..22: mol_type = other RNA
ggaagctggagtcggcatactc

SEQ ID NO: 5259 - RNA, 22 nt, synthetic construct
  source 1..22: mol_type = other RNA
ggaaggggtactgtcggaggta

SEQ ID NO: 5260 - RNA, 22 nt, synthetic construct
  source 1..22: mol_type = other RNA
ggacaagcagttggagtccaga

SEQ ID NO: 5261 - RNA, 22 nt, synthetic construct
  source 1..22: mol_type = other RNA
ggactccaactgcttgtccagg

SEQ ID NO: 5262 - RNA, 22 nt, synthetic construct
  source 1..22: mol_type = other RNA
ggactgcctgccactgccccgg

SEQ ID NO: 5263 - RNA, 22 nt, synthetic construct
  source 1..22: mol_type = other RNA
ggagcaggatcggggctgtcgc

SEQ ID NO: 5264 - RNA, 22 nt, synthetic construct
  source 1..22: mol_type = other RNA
ggagcaggcagtgctgggtcac

SEQ ID NO: 5265 - RNA, 22 nt, synthetic construct
  source 1..22: mol_type = other RNA
ggaggagcaggcagtgctgggt

SEQ ID NO: 5266 - RNA, 22 nt, synthetic construct
  source 1..22: mol_type = other RNA
ggaggatgcgcctagtgaccca

SEQ ID NO: 5267 - RNA, 22 nt, synthetic construct
  source 1..22: mol_type = other RNA
ggaggccacatagtgctgcaca

SEQ ID NO: 5268 - RNA, 22 nt, synthetic construct
  source 1..22: mol_type = other RNA
ggaggtagtcggccatgcgccg

SEQ ID NO: 5269 - RNA, 22 nt, synthetic construct
  source 1..22: mol_type = other RNA
ggagtccagacggaagctggag

SEQ ID NO: 5270 - RNA, 22 nt, synthetic construct
  source 1..22: mol_type = other RNA
ggagtcggcatactcaatgcgt

SEQ ID NO: 5271 - RNA, 22 nt, synthetic construct
  source 1..22: mol_type = other RNA
ggatcggggctgtcgcttcggg

SEQ ID NO: 5272 - RNA, 22 nt, synthetic construct
  source 1..22: mol_type = other RNA
ggatgcgcctagtgacccagca

SEQ ID NO: 5273 - RNA, 22 nt, synthetic construct
  source 1..22: mol_type = other RNA
ggatgcgtggcctggacaagca

SEQ ID NO: 5274 - RNA, 22 nt, synthetic construct
  source 1..22: mol_type = other RNA
ggatgtggtcagccttgtgcag

SEQ ID NO: 5275 - RNA, 22 nt, synthetic construct
  source 1..22: mol_type = other RNA
ggcacaggtgttgcaggctgcg

SEQ ID NO: 5276 - RNA, 22 nt, synthetic construct
  source 1..22: mol_type = other RNA
ggcacgttcttagtacgtgaca

SEQ ID NO: 5277 - RNA, 22 nt, synthetic construct
  source 1..22: mol_type = other RNA
ggcactgcttctgcgtacaaag

SEQ ID NO: 5278 - RNA, 22 nt, synthetic construct
  source 1..22: mol_type = other RNA
ggcagattgccccgtacagtca

SEQ ID NO: 5279 - RNA, 22 nt, synthetic construct
  source 1..22: mol_type = other RNA
ggcaggcagtccacgtcggcca

SEQ ID NO: 5280 - RNA, 22 nt, synthetic construct
  source 1..22: mol_type = other RNA
ggcagtccacgtcggccaccag

SEQ ID NO: 5281 - RNA, 22 nt, synthetic construct
  source 1..22: mol_type = other RNA
ggcagtgctgggtcactaggcg

SEQ ID NO: 5282 - RNA, 22 nt, synthetic construct
  source 1..22: mol_type = other RNA
ggcagtggcaggcagtccacgt

SEQ ID NO: 5283 - RNA, 22 nt, synthetic construct
  source 1..22: mol_type = other RNA
ggcatactcaatgcgtacattg

SEQ ID NO: 5284 - RNA, 22 nt, synthetic construct
  source 1..22: mol_type = other RNA
ggcataggcagggccggggtgg

SEQ ID NO: 5285 - RNA, 22 nt, synthetic construct
  source 1..22: mol_type = other RNA
ggcatcttctgcaggtgttgtc

SEQ ID NO: 5286 - RNA, 22 nt, synthetic construct
  source 1..22: mol_type = other RNA
ggccacatagtgctgcacaagg

SEQ ID NO: 5287 - RNA, 22 nt, synthetic construct
  source 1..22: mol_type = other RNA
ggccaccagacggttgatgaca

SEQ ID NO: 5288 - RNA, 22 nt, synthetic construct
  source 1..22: mol_type = other RNA
ggccacgagtggttttcactga

SEQ ID NO: 5289 - RNA, 22 nt, synthetic construct
  source 1..22: mol_type = other RNA
ggccacgcatcctggcctttcc

SEQ ID NO: 5290 - RNA, 22 nt, synthetic construct
  source 1..22: mol_type = other RNA
ggccagcgaggcccgacaacac

SEQ ID NO: 5291 - RNA, 22 nt, synthetic construct
  source 1..22: mol_type = other RNA
ggccaggatgcgtggcctggac

SEQ ID NO: 5292 - RNA, 22 nt, synthetic construct
  source 1..22: mol_type = other RNA
ggccccaccaatgtacgcattg

SEQ ID NO: 5293 - RNA, 22 nt, synthetic construct
  source 1..22: mol_type = other RNA
ggccccctctgcacttgcctag

SEQ ID NO: 5294 - RNA, 22 nt, synthetic construct
  source 1..22: mol_type = other RNA
ggcccgacaacacctgcagaag

SEQ ID NO: 5295 - RNA, 22 nt, synthetic construct
  source 1..22: mol_type = other RNA
ggccctgcctatgcctaaggag

SEQ ID NO: 5296 - RNA, 22 nt, synthetic construct
  source 1..22: mol_type = other RNA
ggccgacgtggactgcctgcca

SEQ ID NO: 5297 - RNA, 22 nt, synthetic construct
  source 1..22: mol_type = other RNA
ggccgactacctccgacagtac

SEQ ID NO: 5298 - RNA, 22 nt, synthetic construct
  source 1..22: mol_type = other RNA
ggccggggtgggagcaggatcg

SEQ ID NO: 5299 - RNA, 22 nt, synthetic construct
  source 1..22: mol_type = other RNA
ggccgtaatggaaccccaatac

SEQ ID NO: 5300 - RNA, 22 nt, synthetic construct
  source 1..22: mol_type = other RNA
ggcctcctgcactgctgatacc

SEQ ID NO: 5301 - RNA, 22 nt, synthetic construct
  source 1..22: mol_type = other RNA
ggcctcgctggccgtaatggaa

SEQ ID NO: 5302 - RNA, 22 nt, synthetic construct
  source 1..22: mol_type = other RNA
ggcctggacaagcagttggagt

SEQ ID NO: 5303 - RNA, 22 nt, synthetic construct
  source 1..22: mol_type = other RNA
ggcctttccggatgtggtcagc

SEQ ID NO: 5304 - RNA, 22 nt, synthetic construct
  source 1..22: mol_type = other RNA
ggcgcatcctccttaggcatag

SEQ ID NO: 5305 - RNA, 22 nt, synthetic construct
  source 1..22: mol_type = other RNA
ggcgcatggccgactacctccg

SEQ ID NO: 5306 - RNA, 22 nt, synthetic construct
  source 1..22: mol_type = other RNA
ggcggcacaggtgttgcaggct

SEQ ID NO: 5307 - RNA, 22 nt, synthetic construct
  source 1..22: mol_type = other RNA
ggctgaccacatccggaaaggc

SEQ ID NO: 5308 - RNA, 22 nt, synthetic construct
  source 1..22: mol_type = other RNA
ggctgcaccagttttaggtgta

SEQ ID NO: 5309 - RNA, 22 nt, synthetic construct
  source 1..22: mol_type = other RNA
ggctgcgggcactgcttctgcg

SEQ ID NO: 5310 - RNA, 22 nt, synthetic construct
  source 1..22: mol_type = other RNA
ggctggtattggggttccatta

SEQ ID NO: 5311 - RNA, 22 nt, synthetic construct
  source 1..22: mol_type = other RNA
ggctggtggaggagcaggcagt

SEQ ID NO: 5312 - RNA, 22 nt, synthetic construct
  source 1..22: mol_type = other RNA
ggctgtcgcttcgggtatcagc

SEQ ID NO: 5313 - RNA, 22 nt, synthetic construct
  source 1..22: mol_type = other RNA
gggagcaggatcggggctgtcg

SEQ ID NO: 5314 - RNA, 22 nt, synthetic construct
  source 1..22: mol_type = other RNA
gggcactgcttctgcgtacaaa

SEQ ID NO: 5315 - RNA, 22 nt, synthetic construct
  source 1..22: mol_type = other RNA
gggcagattgccccgtacagtc

SEQ ID NO: 5316 - RNA, 22 nt, synthetic construct
  source 1..22: mol_type = other RNA
gggcagtggcaggcagtccacg

SEQ ID NO: 5317 - RNA, 22 nt, synthetic construct
  source 1..22: mol_type = other RNA
gggccacgagtggttttcactg

SEQ ID NO: 5318 - RNA, 22 nt, synthetic construct
  source 1..22: mol_type = other RNA
gggccggggtgggagcaggatc

SEQ ID NO: 5319 - RNA, 22 nt, synthetic construct
  source 1..22: mol_type = other RNA
gggcctcgctggccgtaatgga

SEQ ID NO: 5320 - RNA, 22 nt, synthetic construct
  source 1..22: mol_type = other RNA
gggctgcaccagttttaggtgt

SEQ ID NO: 5321 - RNA, 22 nt, synthetic construct
  source 1..22: mol_type = other RNA
gggctgtcgcttcgggtatcag

SEQ ID NO: 5322 - RNA, 22 nt, synthetic construct
  source 1..22: mol_type = other RNA
ggggcagtggcaggcagtccac

SEQ ID NO: 5323 - RNA, 22 nt, synthetic construct
  source 1..22: mol_type = other RNA
ggggccacgagtggttttcact

SEQ ID NO: 5324 - RNA, 22 nt, synthetic construct
  source 1..22: mol_type = other RNA
ggggctgtcgcttcgggtatca

SEQ ID NO: 5325 - RNA, 22 nt, synthetic construct
  source 1..22: mol_type = other RNA
ggggtactgtcggaggtagtcg

SEQ ID NO: 5326 - RNA, 22 nt, synthetic construct
  source 1..22: mol_type = other RNA
ggggtgcgtgctgtcacgtact

SEQ ID NO: 5327 - RNA, 22 nt, synthetic construct
  source 1..22: mol_type = other RNA
ggggtgggagcaggatcggggc

SEQ ID NO: 5328 - RNA, 22 nt, synthetic construct
  source 1..22: mol_type = other RNA
ggggttccattacggccagcga

SEQ ID NO: 5329 - RNA, 22 nt, synthetic construct
  source 1..22: mol_type = other RNA
gggtactgtcggaggtagtcgg

SEQ ID NO: 5330 - RNA, 22 nt, synthetic construct
  source 1..22: mol_type = other RNA
gggtatcagcagtgcaggaggc

SEQ ID NO: 5331 - RNA, 22 nt, synthetic construct
  source 1..22: mol_type = other RNA
gggtcactaggcgcatcctcct

SEQ ID NO: 5332 - RNA, 22 nt, synthetic construct
  source 1..22: mol_type = other RNA
gggtgagggtgggcagattgcc

SEQ ID NO: 5333 - RNA, 22 nt, synthetic construct
  source 1..22: mol_type = other RNA
gggtgcgtgctgtcacgtacta

SEQ ID NO: 5334 - RNA, 22 nt, synthetic construct
  source 1..22: mol_type = other RNA
gggtgggagcaggatcggggct

SEQ ID NO: 5335 - RNA, 22 nt, synthetic construct
  source 1..22: mol_type = other RNA
gggtgggcagattgccccgtac

SEQ ID NO: 5336 - RNA, 22 nt, synthetic construct
  source 1..22: mol_type = other RNA
gggttccattacggccagcgag

SEQ ID NO: 5337 - RNA, 22 nt, synthetic construct
  source 1..22: mol_type = other RNA
ggtactgtcggaggtagtcggc

SEQ ID NO: 5338 - RNA, 22 nt, synthetic construct
  source 1..22: mol_type = other RNA
ggtagctggggtgcgtgctgtc

SEQ ID NO: 5339 - RNA, 22 nt, synthetic construct
  source 1..22: mol_type = other RNA
ggtagtcggccatgcgccgggg

SEQ ID NO: 5340 - RNA, 22 nt, synthetic construct
  source 1..22: mol_type = other RNA
ggtatcagcagtgcaggaggcc

SEQ ID NO: 5341 - RNA, 22 nt, synthetic construct
  source 1..22: mol_type = other RNA
ggtattggggttccattacggc

SEQ ID NO: 5342 - RNA, 22 nt, synthetic construct
  source 1..22: mol_type = other RNA
ggtcactaggcgcatcctcctt

SEQ ID NO: 5343 - RNA, 22 nt, synthetic construct
  source 1..22: mol_type = other RNA
ggtcagccttgtgcagcactat

SEQ ID NO: 5344 - RNA, 22 nt, synthetic construct
  source 1..22: mol_type = other RNA
ggtgagggtgggcagattgccc

SEQ ID NO: 5345 - RNA, 22 nt, synthetic construct
  source 1..22: mol_type = other RNA
ggtgcagccctttgtacgcaga

SEQ ID NO: 5346 - RNA, 22 nt, synthetic construct
  source 1..22: mol_type = other RNA
ggtgcgtgctgtcacgtactaa

SEQ ID NO: 5347 - RNA, 22 nt, synthetic construct
  source 1..22: mol_type = other RNA
ggtggaggagcaggcagtgctg

SEQ ID NO: 5348 - RNA, 22 nt, synthetic construct
  source 1..22: mol_type = other RNA
ggtggccgacgtggactgcctg

SEQ ID NO: 5349 - RNA, 22 nt, synthetic construct
  source 1..22: mol_type = other RNA
ggtgggagcaggatcggggctg

SEQ ID NO: 5350 - RNA, 22 nt, synthetic construct
  source 1..22: mol_type = other RNA
ggtgggcagattgccccgtaca

SEQ ID NO: 5351 - RNA, 22 nt, synthetic construct
  source 1..22: mol_type = other RNA
ggtggggccacgagtggttttc

SEQ ID NO: 5352 - RNA, 22 nt, synthetic construct
  source 1..22: mol_type = other RNA
ggtgtacagcagtggctggtgg

SEQ ID NO: 5353 - RNA, 22 nt, synthetic construct
  source 1..22: mol_type = other RNA
ggtgttgcaggctgcgggcact

SEQ ID NO: 5354 - RNA, 22 nt, synthetic construct
  source 1..22: mol_type = other RNA
ggtgttgtcgggcctcgctggc

SEQ ID NO: 5355 - RNA, 22 nt, synthetic construct
  source 1..22: mol_type = other RNA
ggttccattacggccagcgagg

SEQ ID NO: 5356 - RNA, 22 nt, synthetic construct
  source 1..22: mol_type = other RNA
ggttgatgacaaggcggcacag

SEQ ID NO: 5357 - RNA, 22 nt, synthetic construct
  source 1..22: mol_type = other RNA
ggttttcactgacagcgtgaac

SEQ ID NO: 5358 - RNA, 22 nt, synthetic construct
  source 1..22: mol_type = other RNA
gtaatggaaccccaataccagc

SEQ ID NO: 5359 - RNA, 22 nt, synthetic construct
  source 1..22: mol_type = other RNA
gtacaaagggctgcaccagttt

SEQ ID NO: 5360 - RNA, 22 nt, synthetic construct
  source 1..22: mol_type = other RNA
gtacacctaaaactggtgcagc

SEQ ID NO: 5361 - RNA, 22 nt, synthetic construct
  source 1..22: mol_type = other RNA
gtacagcagtggctggtggagg

SEQ ID NO: 5362 - RNA, 22 nt, synthetic construct
  source 1..22: mol_type = other RNA
gtacagtcagagctggaagggg

SEQ ID NO: 5363 - RNA, 22 nt, synthetic construct
  source 1..22: mol_type = other RNA
gtacattggtggggccacgagt

SEQ ID NO: 5364 - RNA, 22 nt, synthetic construct
  source 1..22: mol_type = other RNA
gtaccccttccagctctgactg

SEQ ID NO: 5365 - RNA, 22 nt, synthetic construct
  source 1..22: mol_type = other RNA
gtacgcagaagcagtgcccgca

SEQ ID NO: 5366 - RNA, 22 nt, synthetic construct
  source 1..22: mol_type = other RNA
gtacgcattgagtatgccgact

SEQ ID NO: 5367 - RNA, 22 nt, synthetic construct
  source 1..22: mol_type = other RNA
gtacggggcaatctgcccaccc

SEQ ID NO: 5368 - RNA, 22 nt, synthetic construct
  source 1..22: mol_type = other RNA
gtacgtgacagcacgcacccca

SEQ ID NO: 5369 - RNA, 22 nt, synthetic construct
  source 1..22: mol_type = other RNA
gtactaagaacgtgccttctgg

SEQ ID NO: 5370 - RNA, 22 nt, synthetic construct
  source 1..22: mol_type = other RNA
gtactgtcggaggtagtcggcc

SEQ ID NO: 5371 - RNA, 22 nt, synthetic construct
  source 1..22: mol_type = other RNA
gtagctggggtgcgtgctgtca

SEQ ID NO: 5372 - RNA, 22 nt, synthetic construct
  source 1..22: mol_type = other RNA
gtagtcggccatgcgccggggc

SEQ ID NO: 5373 - RNA, 22 nt, synthetic construct
  source 1..22: mol_type = other RNA
gtatcagcagtgcaggaggcca

SEQ ID NO: 5374 - RNA, 22 nt, synthetic construct
  source 1..22: mol_type = other RNA
gtatgccgactccagcttccgt

SEQ ID NO: 5375 - RNA, 22 nt, synthetic construct
  source 1..22: mol_type = other RNA
gtattggggttccattacggcc

SEQ ID NO: 5376 - RNA, 22 nt, synthetic construct
  source 1..22: mol_type = other RNA
gtcacgtactaagaacgtgcct

SEQ ID NO: 5377 - RNA, 22 nt, synthetic construct
  source 1..22: mol_type = other RNA
gtcactaggcgcatcctcctta

SEQ ID NO: 5378 - RNA, 22 nt, synthetic construct
  source 1..22: mol_type = other RNA
gtcagagctggaaggggtactg

SEQ ID NO: 5379 - RNA, 22 nt, synthetic construct
  source 1..22: mol_type = other RNA
gtcagccttgtgcagcactatg

SEQ ID NO: 5380 - RNA, 22 nt, synthetic construct
  source 1..22: mol_type = other RNA
gtcagtgaaaaccactcgtggc

SEQ ID NO: 5381 - RNA, 22 nt, synthetic construct
  source 1..22: mol_type = other RNA
gtcatcaaccgtctggtggccg

SEQ ID NO: 5382 - RNA, 22 nt, synthetic construct
  source 1..22: mol_type = other RNA
gtccacgtcggccaccagacgg

SEQ ID NO: 5383 - RNA, 22 nt, synthetic construct
  source 1..22: mol_type = other RNA
gtccagacggaagctggagtcg

SEQ ID NO: 5384 - RNA, 22 nt, synthetic construct
  source 1..22: mol_type = other RNA
gtccaggccacgcatcctggcc

SEQ ID NO: 5385 - RNA, 22 nt, synthetic construct
  source 1..22: mol_type = other RNA
gtcccttggccccctctgcact

SEQ ID NO: 5386 - RNA, 22 nt, synthetic construct
  source 1..22: mol_type = other RNA
gtcgcttcgggtatcagcagtg

SEQ ID NO: 5387 - RNA, 22 nt, synthetic construct
  source 1..22: mol_type = other RNA
gtcggaggtagtcggccatgcg

SEQ ID NO: 5388 - RNA, 22 nt, synthetic construct
  source 1..22: mol_type = other RNA
gtcggcatactcaatgcgtaca

SEQ ID NO: 5389 - RNA, 22 nt, synthetic construct
  source 1..22: mol_type = other RNA
gtcggccaccagacggttgatg

SEQ ID NO: 5390 - RNA, 22 nt, synthetic construct
  source 1..22: mol_type = other RNA
gtcggccatgcgccggggcagt

SEQ ID NO: 5391 - RNA, 22 nt, synthetic construct
  source 1..22: mol_type = other RNA
gtcgggcctcgctggccgtaat

SEQ ID NO: 5392 - RNA, 22 nt, synthetic construct
  source 1..22: mol_type = other RNA
gtctggactccaactgcttgtc

SEQ ID NO: 5393 - RNA, 22 nt, synthetic construct
  source 1..22: mol_type = other RNA
gtctggtggccgacgtggactg

SEQ ID NO: 5394 - RNA, 22 nt, synthetic construct
  source 1..22: mol_type = other RNA
gtgaaaaccactcgtggcccca

SEQ ID NO: 5395 - RNA, 22 nt, synthetic construct
  source 1..22: mol_type = other RNA
gtgaacaggtagctggggtgcg

SEQ ID NO: 5396 - RNA, 22 nt, synthetic construct
  source 1..22: mol_type = other RNA
gtgacagcacgcaccccagcta

SEQ ID NO: 5397 - RNA, 22 nt, synthetic construct
  source 1..22: mol_type = other RNA
gtgacccagcactgcctgctcc

SEQ ID NO: 5398 - RNA, 22 nt, synthetic construct
  source 1..22: mol_type = other RNA
gtgagggtgggcagattgcccc

SEQ ID NO: 5399 - RNA, 22 nt, synthetic construct
  source 1..22: mol_type = other RNA
gtgcagcactatgtggcctcct

SEQ ID NO: 5400 - RNA, 22 nt, synthetic construct
  source 1..22: mol_type = other RNA
gtgcagccctttgtacgcagaa

SEQ ID NO: 5401 - RNA, 22 nt, synthetic construct
  source 1..22: mol_type = other RNA
gtgcaggaggccacatagtgct

SEQ ID NO: 5402 - RNA, 22 nt, synthetic construct
  source 1..22: mol_type = other RNA
gtgcccgcagcctgcaacacct

SEQ ID NO: 5403 - RNA, 22 nt, synthetic construct
  source 1..22: mol_type = other RNA
gtgccgccttgtcatcaaccgt

SEQ ID NO: 5404 - RNA, 22 nt, synthetic construct
  source 1..22: mol_type = other RNA
gtgccttctggcatcttctgca

SEQ ID NO: 5405 - RNA, 22 nt, synthetic construct
  source 1..22: mol_type = other RNA
gtgcgtgctgtcacgtactaag

SEQ ID NO: 5406 - RNA, 22 nt, synthetic construct
  source 1..22: mol_type = other RNA
gtgctgcacaaggctgaccaca

SEQ ID NO: 5407 - RNA, 22 nt, synthetic construct
  source 1..22: mol_type = other RNA
gtgctgggtcactaggcgcatc

SEQ ID NO: 5408 - RNA, 22 nt, synthetic construct
  source 1..22: mol_type = other RNA
gtgctgtcacgtactaagaacg

SEQ ID NO: 5409 - RNA, 22 nt, synthetic construct
  source 1..22: mol_type = other RNA
gtggactgcctgccactgcccc

SEQ ID NO: 5410 - RNA, 22 nt, synthetic construct
  source 1..22: mol_type = other RNA
gtggaggagcaggcagtgctgg

SEQ ID NO: 5411 - RNA, 22 nt, synthetic construct
  source 1..22: mol_type = other RNA
gtggcaggcagtccacgtcggc

SEQ ID NO: 5412 - RNA, 22 nt, synthetic construct
  source 1..22: mol_type = other RNA
gtggccccaccaatgtacgcat

SEQ ID NO: 5413 - RNA, 22 nt, synthetic construct
  source 1..22: mol_type = other RNA
gtggccgacgtggactgcctgc

SEQ ID NO: 5414 - RNA, 22 nt, synthetic construct
  source 1..22: mol_type = other RNA
gtggcctcctgcactgctgata

SEQ ID NO: 5415 - RNA, 22 nt, synthetic construct
  source 1..22: mol_type = other RNA
gtggcctggacaagcagttgga

SEQ ID NO: 5416 - RNA, 22 nt, synthetic construct
  source 1..22: mol_type = other RNA
gtggctggtggaggagcaggca

SEQ ID NO: 5417 - RNA, 22 nt, synthetic construct
  source 1..22: mol_type = other RNA
gtgggagcaggatcggggctgt

SEQ ID NO: 5418 - RNA, 22 nt, synthetic construct
  source 1..22: mol_type = other RNA
gtgggcagattgccccgtacag

SEQ ID NO: 5419 - RNA, 22 nt, synthetic construct
  source 1..22: mol_type = other RNA
gtggggccacgagtggttttca

SEQ ID NO: 5420 - RNA, 22 nt, synthetic construct
  source 1..22: mol_type = other RNA
gtggtcagccttgtgcagcact

SEQ ID NO: 5421 - RNA, 22 nt, synthetic construct
  source 1..22: mol_type = other RNA
gtggttttcactgacagcgtga

SEQ ID NO: 5422 - RNA, 22 nt, synthetic construct
  source 1..22: mol_type = other RNA
gtgtacagcagtggctggtgga

SEQ ID NO: 5423 - RNA, 22 nt, synthetic construct
  source 1..22: mol_type = other RNA
gtgttgcaggctgcgggcactg

SEQ ID NO: 5424 - RNA, 22 nt, synthetic construct
  source 1..22: mol_type = other RNA
gtgttgtcgggcctcgctggcc

SEQ ID NO: 5425 - RNA, 22 nt, synthetic construct
  source 1..22: mol_type = other RNA
gttcacgctgtcagtgaaaacc

SEQ ID NO: 5426 - RNA, 22 nt, synthetic construct
  source 1..22: mol_type = other RNA
gttccattacggccagcgaggc

SEQ ID NO: 5427 - RNA, 22 nt, synthetic construct
  source 1..22: mol_type = other RNA
gttcttagtacgtgacagcacg

SEQ ID NO: 5428 - RNA, 22 nt, synthetic construct
  source 1..22: mol_type = other RNA
gttgatgacaaggcggcacagg

SEQ ID NO: 5429 - RNA, 22 nt, synthetic construct
  source 1..22: mol_type = other RNA
gttgcaggctgcgggcactgct

SEQ ID NO: 5430 - RNA, 22 nt, synthetic construct
  source 1..22: mol_type = other RNA
gttggagtccagacggaagctg

SEQ ID NO: 5431 - RNA, 22 nt, synthetic construct
  source 1..22: mol_type = other RNA
gttgtcgggcctcgctggccgt

SEQ ID NO: 5432 - RNA, 22 nt, synthetic construct
  source 1..22: mol_type = other RNA
gttttaggtgtacagcagtggc

SEQ ID NO: 5433 - RNA, 22 nt, synthetic construct
  source 1..22: mol_type = other RNA
gttttcactgacagcgtgaaca

SEQ ID NO: 5434 - RNA, 22 nt, synthetic construct
  source 1..22: mol_type = other RNA
taaaactggtgcagccctttgt

SEQ ID NO: 5435 - RNA, 22 nt, synthetic construct
  source 1..22: mol_type = other RNA
taagaacgtgccttctggcatc

SEQ ID NO: 5436 - RNA, 22 nt, synthetic construct
  source 1..22: mol_type = other RNA
taaggaggatgcgcctagtgac

SEQ ID NO: 5437 - RNA, 22 nt, synthetic construct
  source 1..22: mol_type = other RNA
taatggaaccccaataccagcc

SEQ ID NO: 5438 - RNA, 22 nt, synthetic construct
  source 1..22: mol_type = other RNA
tacaaagggctgcaccagtttt

SEQ ID NO: 5439 - RNA, 22 nt, synthetic construct
  source 1..22: mol_type = other RNA
tacacctaaaactggtgcagcc

SEQ ID NO: 5440 - RNA, 22 nt, synthetic construct
  source 1..22: mol_type = other RNA
tacagcagtggctggtggagga

SEQ ID NO: 5441 - RNA, 22 nt, synthetic construct
  source 1..22: mol_type = other RNA
tacagtcagagctggaaggggt

SEQ ID NO: 5442 - RNA, 22 nt, synthetic construct
  source 1..22: mol_type = other RNA
tacattggtggggccacgagtg

SEQ ID NO: 5443 - RNA, 22 nt, synthetic construct
  source 1..22: mol_type = other RNA
taccagcctaggcaagtgcaga

SEQ ID NO: 5444 - RNA, 22 nt, synthetic construct
  source 1..22: mol_type = other RNA
taccccttccagctctgactgt

SEQ ID NO: 5445 - RNA, 22 nt, synthetic construct
  source 1..22: mol_type = other RNA
tacccgaagcgacagccccgat

SEQ ID NO: 5446 - RNA, 22 nt, synthetic construct
  source 1..22: mol_type = other RNA
tacctccgacagtaccccttcc

SEQ ID NO: 5447 - RNA, 22 nt, synthetic construct
  source 1..22: mol_type = other RNA
tacctgttcacgctgtcagtga

SEQ ID NO: 5448 - RNA, 22 nt, synthetic construct
  source 1..22: mol_type = other RNA
tacgcagaagcagtgcccgcag

SEQ ID NO: 5449 - RNA, 22 nt, synthetic construct
  source 1..22: mol_type = other RNA
tacgcattgagtatgccgactc

SEQ ID NO: 5450 - RNA, 22 nt, synthetic construct
  source 1..22: mol_type = other RNA
tacggccagcgaggcccgacaa

SEQ ID NO: 5451 - RNA, 22 nt, synthetic construct
  source 1..22: mol_type = other RNA
tacgtgacagcacgcaccccag

SEQ ID NO: 5452 - RNA, 22 nt, synthetic construct
  source 1..22: mol_type = other RNA
tactaagaacgtgccttctggc

SEQ ID NO: 5453 - RNA, 22 nt, synthetic construct
  source 1..22: mol_type = other RNA
tactcaatgcgtacattggtgg

SEQ ID NO: 5454 - RNA, 22 nt, synthetic construct
  source 1..22: mol_type = other RNA
tactgtcggaggtagtcggcca

SEQ ID NO: 5455 - RNA, 22 nt, synthetic construct
  source 1..22: mol_type = other RNA
tagctggggtgcgtgctgtcac

SEQ ID NO: 5456 - RNA, 22 nt, synthetic construct
  source 1..22: mol_type = other RNA
taggcaagtgcagagggggcca

SEQ ID NO: 5457 - RNA, 22 nt, synthetic construct
  source 1..22: mol_type = other RNA
taggcagggccggggtgggagc

SEQ ID NO: 5458 - RNA, 22 nt, synthetic construct
  source 1..22: mol_type = other RNA
taggcataggcagggccggggt

SEQ ID NO: 5459 - RNA, 22 nt, synthetic construct
  source 1..22: mol_type = other RNA
taggcgcatcctccttaggcat

SEQ ID NO: 5460 - RNA, 22 nt, synthetic construct
  source 1..22: mol_type = other RNA
taggctggtattggggttccat

SEQ ID NO: 5461 - RNA, 22 nt, synthetic construct
  source 1..22: mol_type = other RNA
taggtgtacagcagtggctggt

SEQ ID NO: 5462 - RNA, 22 nt, synthetic construct
  source 1..22: mol_type = other RNA
tagtacgtgacagcacgcaccc

SEQ ID NO: 5463 - RNA, 22 nt, synthetic construct
  source 1..22: mol_type = other RNA
tagtcggccatgcgccggggca

SEQ ID NO: 5464 - RNA, 22 nt, synthetic construct
  source 1..22: mol_type = other RNA
tagtgacccagcactgcctgct

SEQ ID NO: 5465 - RNA, 22 nt, synthetic construct
  source 1..22: mol_type = other RNA
tagtgctgcacaaggctgacca

SEQ ID NO: 5466 - RNA, 22 nt, synthetic construct
  source 1..22: mol_type = other RNA
tatcagcagtgcaggaggccac

SEQ ID NO: 5467 - RNA, 22 nt, synthetic construct
  source 1..22: mol_type = other RNA
tatgccgactccagcttccgtc

SEQ ID NO: 5468 - RNA, 22 nt, synthetic construct
  source 1..22: mol_type = other RNA
tatgcctaaggaggatgcgcct

SEQ ID NO: 5469 - RNA, 22 nt, synthetic construct
  source 1..22: mol_type = other RNA
tatgtggcctcctgcactgctg

SEQ ID NO: 5470 - RNA, 22 nt, synthetic construct
  source 1..22: mol_type = other RNA
tattggggttccattacggcca

SEQ ID NO: 5471 - RNA, 22 nt, synthetic construct
  source 1..22: mol_type = other RNA
tcaaccgtctggtggccgacgt

SEQ ID NO: 5472 - RNA, 22 nt, synthetic construct
  source 1..22: mol_type = other RNA
tcaatgcgtacattggtggggc

SEQ ID NO: 5473 - RNA, 22 nt, synthetic construct
  source 1..22: mol_type = other RNA
tcacgctgtcagtgaaaaccac

SEQ ID NO: 5474 - RNA, 22 nt, synthetic construct
  source 1..22: mol_type = other RNA
tcacgtactaagaacgtgcctt

SEQ ID NO: 5475 - RNA, 22 nt, synthetic construct
  source 1..22: mol_type = other RNA
tcactaggcgcatcctccttag

SEQ ID NO: 5476 - RNA, 22 nt, synthetic construct
  source 1..22: mol_type = other RNA
tcactgacagcgtgaacaggta

SEQ ID NO: 5477 - RNA, 22 nt, synthetic construct
  source 1..22: mol_type = other RNA
tcagagctggaaggggtactgt

SEQ ID NO: 5478 - RNA, 22 nt, synthetic construct
  source 1..22: mol_type = other RNA
tcagcagtgcaggaggccacat

SEQ ID NO: 5479 - RNA, 22 nt, synthetic construct
  source 1..22: mol_type = other RNA
tcagccttgtgcagcactatgt

SEQ ID NO: 5480 - RNA, 22 nt, synthetic construct
  source 1..22: mol_type = other RNA
tcagtgaaaaccactcgtggcc

SEQ ID NO: 5481 - RNA, 22 nt, synthetic construct
  source 1..22: mol_type = other RNA
tcatcaaccgtctggtggccga

SEQ ID NO: 5482 - RNA, 22 nt, synthetic construct
  source 1..22: mol_type = other RNA
tccaactgcttgtccaggccac

SEQ ID NO: 5483 - RNA, 22 nt, synthetic construct
  source 1..22: mol_type = other RNA
tccaccagccactgctgtacac

SEQ ID NO: 5484 - RNA, 22 nt, synthetic construct
  source 1..22: mol_type = other RNA
tccacgtcggccaccagacggt

SEQ ID NO: 5485 - RNA, 22 nt, synthetic construct
  source 1..22: mol_type = other RNA
tccagacggaagctggagtcgg

SEQ ID NO: 5486 - RNA, 22 nt, synthetic construct
  source 1..22: mol_type = other RNA
tccagctctgactgtacggggc

SEQ ID NO: 5487 - RNA, 22 nt, synthetic construct
  source 1..22: mol_type = other RNA
tccagcttccgtctggactcca

SEQ ID NO: 5488 - RNA, 22 nt, synthetic construct
  source 1..22: mol_type = other RNA
tccaggccacgcatcctggcct

SEQ ID NO: 5489 - RNA, 22 nt, synthetic construct
  source 1..22: mol_type = other RNA
tccattacggccagcgaggccc

SEQ ID NO: 5490 - RNA, 22 nt, synthetic construct
  source 1..22: mol_type = other RNA
tcccaccccggccctgcctatg

SEQ ID NO: 5491 - RNA, 22 nt, synthetic construct
  source 1..22: mol_type = other RNA
tcccttggccccctctgcactt

SEQ ID NO: 5492 - RNA, 22 nt, synthetic construct
  source 1..22: mol_type = other RNA
tccgacagtaccccttccagct

SEQ ID NO: 5493 - RNA, 22 nt, synthetic construct
  source 1..22: mol_type = other RNA
tccggaaaggccaggatgcgtg

SEQ ID NO: 5494 - RNA, 22 nt, synthetic construct
  source 1..22: mol_type = other RNA
tccggatgtggtcagccttgtg

SEQ ID NO: 5495 - RNA, 22 nt, synthetic construct
  source 1..22: mol_type = other RNA
tccgtctggactccaactgctt

SEQ ID NO: 5496 - RNA, 22 nt, synthetic construct
  source 1..22: mol_type = other RNA
tcctccaccagccactgctgta

SEQ ID NO: 5497 - RNA, 22 nt, synthetic construct
  source 1..22: mol_type = other RNA
tcctccttaggcataggcaggg

SEQ ID NO: 5498 - RNA, 22 nt, synthetic construct
  source 1..22: mol_type = other RNA
tcctgcactgctgatacccgaa

SEQ ID NO: 5499 - RNA, 22 nt, synthetic construct
  source 1..22: mol_type = other RNA
tcctgctcccaccccggccctg

SEQ ID NO: 5500 - RNA, 22 nt, synthetic construct
  source 1..22: mol_type = other RNA
tcctggcctttccggatgtggt

SEQ ID NO: 5501 - RNA, 22 nt, synthetic construct
  source 1..22: mol_type = other RNA
tccttaggcataggcagggccg

SEQ ID NO: 5502 - RNA, 22 nt, synthetic construct
  source 1..22: mol_type = other RNA
tcgctggccgtaatggaacccc

SEQ ID NO: 5503 - RNA, 22 nt, synthetic construct
  source 1..22: mol_type = other RNA
tcgcttcgggtatcagcagtgc

SEQ ID NO: 5504 - RNA, 22 nt, synthetic construct
  source 1..22: mol_type = other RNA
tcggaggtagtcggccatgcgc

SEQ ID NO: 5505 - RNA, 22 nt, synthetic construct
  source 1..22: mol_type = other RNA
tcggcatactcaatgcgtacat

SEQ ID NO: 5506 - RNA, 22 nt, synthetic construct
  source 1..22: mol_type = other RNA
tcggccaccagacggttgatga

SEQ ID NO: 5507 - RNA, 22 nt, synthetic construct
  source 1..22: mol_type = other RNA
tcggccatgcgccggggcagtg

SEQ ID NO: 5508 - RNA, 22 nt, synthetic construct
  source 1..22: mol_type = other RNA
tcgggcctcgctggccgtaatg

SEQ ID NO: 5509 - RNA, 22 nt, synthetic construct
  source 1..22: mol_type = other RNA
tcggggctgtcgcttcgggtat

SEQ ID NO: 5510 - RNA, 22 nt, synthetic construct
  source 1..22: mol_type = other RNA
tcgggtatcagcagtgcaggag

SEQ ID NO: 5511 - RNA, 22 nt, synthetic construct
  source 1..22: mol_type = other RNA
tcgtggccccaccaatgtacgc

SEQ ID NO: 5512 - RNA, 22 nt, synthetic construct
  source 1..22: mol_type = other RNA
tctgactgtacggggcaatctg

SEQ ID NO: 5513 - RNA, 22 nt, synthetic construct
  source 1..22: mol_type = other RNA
tctgcacttgcctaggctggta

SEQ ID NO: 5514 - RNA, 22 nt, synthetic construct
  source 1..22: mol_type = other RNA
tctgcaggtgttgtcgggcctc

SEQ ID NO: 5515 - RNA, 22 nt, synthetic construct
  source 1..22: mol_type = other RNA
tctgcgtacaaagggctgcacc

SEQ ID NO: 5516 - RNA, 22 nt, synthetic construct
  source 1..22: mol_type = other RNA
tctggactccaactgcttgtcc

SEQ ID NO: 5517 - RNA, 22 nt, synthetic construct
  source 1..22: mol_type = other RNA
tctggcatcttctgcaggtgtt

SEQ ID NO: 5518 - RNA, 22 nt, synthetic construct
  source 1..22: mol_type = other RNA
tctggtggccgacgtggactgc

SEQ ID NO: 5519 - RNA, 22 nt, synthetic construct
  source 1..22: mol_type = other RNA
tcttagtacgtgacagcacgca

SEQ ID NO: 5520 - RNA, 22 nt, synthetic construct
  source 1..22: mol_type = other RNA
tcttctgcaggtgttgtcgggc

SEQ ID NO: 5521 - RNA, 22 nt, synthetic construct
  source 1..22: mol_type = other RNA
tgaaaaccactcgtggccccac

SEQ ID NO: 5522 - RNA, 22 nt, synthetic construct
  source 1..22: mol_type = other RNA
tgaacaggtagctggggtgcgt

SEQ ID NO: 5523 - RNA, 22 nt, synthetic construct
  source 1..22: mol_type = other RNA
tgacaaggcggcacaggtgttg

SEQ ID NO: 5524 - RNA, 22 nt, synthetic construct
  source 1..22: mol_type = other RNA
tgacagcacgcaccccagctac

SEQ ID NO: 5525 - RNA, 22 nt, synthetic construct
  source 1..22: mol_type = other RNA
tgacagcgtgaacaggtagctg

SEQ ID NO: 5526 - RNA, 22 nt, synthetic construct
  source 1..22: mol_type = other RNA
tgaccacatccggaaaggccag

SEQ ID NO: 5527 - RNA, 22 nt, synthetic construct
  source 1..22: mol_type = other RNA
tgacccagcactgcctgctcct

SEQ ID NO: 5528 - RNA, 22 nt, synthetic construct
  source 1..22: mol_type = other RNA
tgactgtacggggcaatctgcc

SEQ ID NO: 5529 - RNA, 22 nt, synthetic construct
  source 1..22: mol_type = other RNA
tgagggtgggcagattgccccg

SEQ ID NO: 5530 - RNA, 22 nt, synthetic construct
  source 1..22: mol_type = other RNA
tgagtatgccgactccagcttc

SEQ ID NO: 5531 - RNA, 22 nt, synthetic construct
  source 1..22: mol_type = other RNA
tgatacccgaagcgacagcccc

SEQ ID NO: 5532 - RNA, 22 nt, synthetic construct
  source 1..22: mol_type = other RNA
tgatgacaaggcggcacaggtg

SEQ ID NO: 5533 - RNA, 22 nt, synthetic construct
  source 1..22: mol_type = other RNA
tgcaacacctgtgccgccttgt

SEQ ID NO: 5534 - RNA, 22 nt, synthetic construct
  source 1..22: mol_type = other RNA
tgcacaaggctgaccacatccg

SEQ ID NO: 5535 - RNA, 22 nt, synthetic construct
  source 1..22: mol_type = other RNA
tgcaccagttttaggtgtacag

SEQ ID NO: 5536 - RNA, 22 nt, synthetic construct
  source 1..22: mol_type = other RNA
tgcactgctgatacccgaagcg

SEQ ID NO: 5537 - RNA, 22 nt, synthetic construct
  source 1..22: mol_type = other RNA
tgcacttgcctaggctggtatt

SEQ ID NO: 5538 - RNA, 22 nt, synthetic construct
  source 1..22: mol_type = other RNA
tgcagaagatgccagaaggcac

SEQ ID NO: 5539 - RNA, 22 nt, synthetic construct
  source 1..22: mol_type = other RNA
tgcagcactatgtggcctcctg

SEQ ID NO: 5540 - RNA, 22 nt, synthetic construct
  source 1..22: mol_type = other RNA
tgcagccctttgtacgcagaag

SEQ ID NO: 5541 - RNA, 22 nt, synthetic construct
  source 1..22: mol_type = other RNA
tgcaggaggccacatagtgctg

SEQ ID NO: 5542 - RNA, 22 nt, synthetic construct
  source 1..22: mol_type = other RNA
tgcaggctgcgggcactgcttc

SEQ ID NO: 5543 - RNA, 22 nt, synthetic construct
  source 1..22: mol_type = other RNA
tgcaggtgttgtcgggcctcgc

SEQ ID NO: 5544 - RNA, 22 nt, synthetic construct
  source 1..22: mol_type = other RNA
tgccactgccccggcgcatggc

SEQ ID NO: 5545 - RNA, 22 nt, synthetic construct
  source 1..22: mol_type = other RNA
tgccagaaggcacgttcttagt

SEQ ID NO: 5546 - RNA, 22 nt, synthetic construct
  source 1..22: mol_type = other RNA
tgccccggcgcatggccgacta

SEQ ID NO: 5547 - RNA, 22 nt, synthetic construct
  source 1..22: mol_type = other RNA
tgccccgtacagtcagagctgg

SEQ ID NO: 5548 - RNA, 22 nt, synthetic construct
  source 1..22: mol_type = other RNA
tgcccgcagcctgcaacacctg

SEQ ID NO: 5549 - RNA, 22 nt, synthetic construct
  source 1..22: mol_type = other RNA
tgccgactccagcttccgtctg

SEQ ID NO: 5550 - RNA, 22 nt, synthetic construct
  source 1..22: mol_type = other RNA
tgccgccttgtcatcaaccgtc

SEQ ID NO: 5551 - RNA, 22 nt, synthetic construct
  source 1..22: mol_type = other RNA
tgcctaaggaggatgcgcctag

SEQ ID NO: 5552 - RNA, 22 nt, synthetic construct
  source 1..22: mol_type = other RNA
tgcctaggctggtattggggtt

SEQ ID NO: 5553 - RNA, 22 nt, synthetic construct
  source 1..22: mol_type = other RNA
tgcctatgcctaaggaggatgc

SEQ ID NO: 5554 - RNA, 22 nt, synthetic construct
  source 1..22: mol_type = other RNA
tgcctgccactgccccggcgca

SEQ ID NO: 5555 - RNA, 22 nt, synthetic construct
  source 1..22: mol_type = other RNA
tgcctgctcctccaccagccac

SEQ ID NO: 5556 - RNA, 22 nt, synthetic construct
  source 1..22: mol_type = other RNA
tgccttctggcatcttctgcag

SEQ ID NO: 5557 - RNA, 22 nt, synthetic construct
  source 1..22: mol_type = other RNA
tgcgccggggcagtggcaggca

SEQ ID NO: 5558 - RNA, 22 nt, synthetic construct
  source 1..22: mol_type = other RNA
tgcgcctagtgacccagcactg

SEQ ID NO: 5559 - RNA, 22 nt, synthetic construct
  source 1..22: mol_type = other RNA
tgcgggcactgcttctgcgtac

SEQ ID NO: 5560 - RNA, 22 nt, synthetic construct
  source 1..22: mol_type = other RNA
tgcgtacaaagggctgcaccag

SEQ ID NO: 5561 - RNA, 22 nt, synthetic construct
  source 1..22: mol_type = other RNA
tgcgtacattggtggggccacg

SEQ ID NO: 5562 - RNA, 22 nt, synthetic construct
  source 1..22: mol_type = other RNA
tgcgtgctgtcacgtactaaga

SEQ ID NO: 5563 - RNA, 22 nt, synthetic construct
  source 1..22: mol_type = other RNA
tgcgtggcctggacaagcagtt

SEQ ID NO: 5564 - RNA, 22 nt, synthetic construct
  source 1..22: mol_type = other RNA
tgctcccaccccggccctgcct

SEQ ID NO: 5565 - RNA, 22 nt, synthetic construct
  source 1..22: mol_type = other RNA
tgctcctccaccagccactgct

SEQ ID NO: 5566 - RNA, 22 nt, synthetic construct
  source 1..22: mol_type = other RNA
tgctgatacccgaagcgacagc

SEQ ID NO: 5567 - RNA, 22 nt, synthetic construct
  source 1..22: mol_type = other RNA
tgctgcacaaggctgaccacat

SEQ ID NO: 5568 - RNA, 22 nt, synthetic construct
  source 1..22: mol_type = other RNA
tgctgggtcactaggcgcatcc

SEQ ID NO: 5569 - RNA, 22 nt, synthetic construct
  source 1..22: mol_type = other RNA
tgctgtacacctaaaactggtg

SEQ ID NO: 5570 - RNA, 22 nt, synthetic construct
  source 1..22: mol_type = other RNA
tgctgtcacgtactaagaacgt

SEQ ID NO: 5571 - RNA, 22 nt, synthetic construct
  source 1..22: mol_type = other RNA
tgcttctgcgtacaaagggctg

SEQ ID NO: 5572 - RNA, 22 nt, synthetic construct
  source 1..22: mol_type = other RNA
tgcttgtccaggccacgcatcc

SEQ ID NO: 5573 - RNA, 22 nt, synthetic construct
  source 1..22: mol_type = other RNA
tggaaccccaataccagcctag

SEQ ID NO: 5574 - RNA, 22 nt, synthetic construct
  source 1..22: mol_type = other RNA
tggaaggggtactgtcggaggt

SEQ ID NO: 5575 - RNA, 22 nt, synthetic construct
  source 1..22: mol_type = other RNA
tggacaagcagttggagtccag

SEQ ID NO: 5576 - RNA, 22 nt, synthetic construct
  source 1..22: mol_type = other RNA
tggactccaactgcttgtccag

SEQ ID NO: 5577 - RNA, 22 nt, synthetic construct
  source 1..22: mol_type = other RNA
tggactgcctgccactgccccg

SEQ ID NO: 5578 - RNA, 22 nt, synthetic construct
  source 1..22: mol_type = other RNA
tggaggagcaggcagtgctggg

SEQ ID NO: 5579 - RNA, 22 nt, synthetic construct
  source 1..22: mol_type = other RNA
tggagtccagacggaagctgga

SEQ ID NO: 5580 - RNA, 22 nt, synthetic construct
  source 1..22: mol_type = other RNA
tggagtcggcatactcaatgcg

SEQ ID NO: 5581 - RNA, 22 nt, synthetic construct
  source 1..22: mol_type = other RNA
tggcaggcagtccacgtcggcc

SEQ ID NO: 5582 - RNA, 22 nt, synthetic construct
  source 1..22: mol_type = other RNA
tggcatcttctgcaggtgttgt

SEQ ID NO: 5583 - RNA, 22 nt, synthetic construct
  source 1..22: mol_type = other RNA
tggccccaccaatgtacgcatt

SEQ ID NO: 5584 - RNA, 22 nt, synthetic construct
  source 1..22: mol_type = other RNA
tggccccctctgcacttgccta

SEQ ID NO: 5585 - RNA, 22 nt, synthetic construct
  source 1..22: mol_type = other RNA
tggccgacgtggactgcctgcc

SEQ ID NO: 5586 - RNA, 22 nt, synthetic construct
  source 1..22: mol_type = other RNA
tggccgactacctccgacagta

SEQ ID NO: 5587 - RNA, 22 nt, synthetic construct
  source 1..22: mol_type = other RNA
tggccgtaatggaaccccaata

SEQ ID NO: 5588 - RNA, 22 nt, synthetic construct
  source 1..22: mol_type = other RNA
tggcctcctgcactgctgatac

SEQ ID NO: 5589 - RNA, 22 nt, synthetic construct
  source 1..22: mol_type = other RNA
tggcctggacaagcagttggag

SEQ ID NO: 5590 - RNA, 22 nt, synthetic construct
  source 1..22: mol_type = other RNA
tggcctttccggatgtggtcag

SEQ ID NO: 5591 - RNA, 22 nt, synthetic construct
  source 1..22: mol_type = other RNA
tggctggtggaggagcaggcag

SEQ ID NO: 5592 - RNA, 22 nt, synthetic construct
  source 1..22: mol_type = other RNA
tgggagcaggatcggggctgtc

SEQ ID NO: 5593 - RNA, 22 nt, synthetic construct
  source 1..22: mol_type = other RNA
tgggcagattgccccgtacagt

SEQ ID NO: 5594 - RNA, 22 nt, synthetic construct
  source 1..22: mol_type = other RNA
tggggccacgagtggttttcac

SEQ ID NO: 5595 - RNA, 22 nt, synthetic construct
  source 1..22: mol_type = other RNA
tggggtgcgtgctgtcacgtac

SEQ ID NO: 5596 - RNA, 22 nt, synthetic construct
  source 1..22: mol_type = other RNA
tggggttccattacggccagcg

SEQ ID NO: 5597 - RNA, 22 nt, synthetic construct
  source 1..22: mol_type = other RNA
tgggtcactaggcgcatcctcc

SEQ ID NO: 5598 - RNA, 22 nt, synthetic construct
  source 1..22: mol_type = other RNA
tgggtgagggtgggcagattgc

SEQ ID NO: 5599 - RNA, 22 nt, synthetic construct
  source 1..22: mol_type = other RNA
tggtattggggttccattacgg

SEQ ID NO: 5600 - RNA, 22 nt, synthetic construct
  source 1..22: mol_type = other RNA
tggtcagccttgtgcagcacta

SEQ ID NO: 5601 - RNA, 22 nt, synthetic construct
  source 1..22: mol_type = other RNA
tggtgcagccctttgtacgcag

SEQ ID NO: 5602 - RNA, 22 nt, synthetic construct
  source 1..22: mol_type = other RNA
tggtggaggagcaggcagtgct

SEQ ID NO: 5603 - RNA, 22 nt, synthetic construct
  source 1..22: mol_type = other RNA
tggtggccgacgtggactgcct

SEQ ID NO: 5604 - RNA, 22 nt, synthetic construct
  source 1..22: mol_type = other RNA
tggtggggccacgagtggtttt

SEQ ID NO: 5605 - RNA, 22 nt, synthetic construct
  source 1..22: mol_type = other RNA
tggttttcactgacagcgtgaa

SEQ ID NO: 5606 - RNA, 22 nt, synthetic construct
  source 1..22: mol_type = other RNA
tgtacacctaaaactggtgcag

SEQ ID NO: 5607 - RNA, 22 nt, synthetic construct
  source 1..22: mol_type = other RNA
tgtacagcagtggctggtggag

SEQ ID NO: 5608 - RNA, 22 nt, synthetic construct
  source 1..22: mol_type = other RNA
tgtacgcagaagcagtgcccgc

SEQ ID NO: 5609 - RNA, 22 nt, synthetic construct
  source 1..22: mol_type = other RNA
tgtacgcattgagtatgccgac

SEQ ID NO: 5610 - RNA, 22 nt, synthetic construct
  source 1..22: mol_type = other RNA
tgtacggggcaatctgcccacc

SEQ ID NO: 5611 - RNA, 22 nt, synthetic construct
  source 1..22: mol_type = other RNA
tgtcacgtactaagaacgtgcc

SEQ ID NO: 5612 - RNA, 22 nt, synthetic construct
  source 1..22: mol_type = other RNA
tgtcagtgaaaaccactcgtgg

SEQ ID NO: 5613 - RNA, 22 nt, synthetic construct
  source 1..22: mol_type = other RNA
tgtcatcaaccgtctggtggcc

SEQ ID NO: 5614 - RNA, 22 nt, synthetic construct
  source 1..22: mol_type = other RNA
tgtccaggccacgcatcctggc

SEQ ID NO: 5615 - RNA, 22 nt, synthetic construct
  source 1..22: mol_type = other RNA
tgtcccttggccccctctgcac

SEQ ID NO: 5616 - RNA, 22 nt, synthetic construct
  source 1..22: mol_type = other RNA
tgtcgcttcgggtatcagcagt

SEQ ID NO: 5617 - RNA, 22 nt, synthetic construct
  source 1..22: mol_type = other RNA
tgtcggaggtagtcggccatgc

SEQ ID NO: 5618 - RNA, 22 nt, synthetic construct
  source 1..22: mol_type = other RNA
tgtcgggcctcgctggccgtaa

SEQ ID NO: 5619 - RNA, 22 nt, synthetic construct
  source 1..22: mol_type = other RNA
tgtgcagcactatgtggcctcc

SEQ ID NO: 5620 - RNA, 22 nt, synthetic construct
  source 1..22: mol_type = other RNA
tgtgccgccttgtcatcaaccg

SEQ ID NO: 5621 - RNA, 22 nt, synthetic construct
  source 1..22: mol_type = other RNA
tgtggcctcctgcactgctgat

SEQ ID NO: 5622 - RNA, 22 nt, synthetic construct
  source 1..22: mol_type = other RNA
tgtggtcagccttgtgcagcac

SEQ ID NO: 5623 - RNA, 22 nt, synthetic construct
  source 1..22: mol_type = other RNA
tgttcacgctgtcagtgaaaac

SEQ ID NO: 5624 - RNA, 22 nt, synthetic construct
  source 1..22: mol_type = other RNA
tgttgcaggctgcgggcactgc

SEQ ID NO: 5625 - RNA, 22 nt, synthetic construct
  source 1..22: mol_type = other RNA
tgttgtcgggcctcgctggccg

SEQ ID NO: 5626 - RNA, 22 nt, synthetic construct
  source 1..22: mol_type = other RNA
ttacggccagcgaggcccgaca

SEQ ID NO: 5627 - RNA, 22 nt, synthetic construct
  source 1..22: mol_type = other RNA
ttaggcataggcagggccgggg

SEQ ID NO: 5628 - RNA, 22 nt, synthetic construct
  source 1..22: mol_type = other RNA
ttaggtgtacagcagtggctgg

SEQ ID NO: 5629 - RNA, 22 nt, synthetic construct
  source 1..22: mol_type = other RNA
ttagtacgtgacagcacgcacc

SEQ ID NO: 5630 - RNA, 22 nt, synthetic construct
  source 1..22: mol_type = other RNA
ttcacgctgtcagtgaaaacca

SEQ ID NO: 5631 - RNA, 22 nt, synthetic construct
  source 1..22: mol_type = other RNA
ttcactgacagcgtgaacaggt

SEQ ID NO: 5632 - RNA, 22 nt, synthetic construct
  source 1..22: mol_type = other RNA
ttccagctctgactgtacgggg

SEQ ID NO: 5633 - RNA, 22 nt, synthetic construct
  source 1..22: mol_type = other RNA
ttccattacggccagcgaggcc

SEQ ID NO: 5634 - RNA, 22 nt, synthetic construct
  source 1..22: mol_type = other RNA
ttccggatgtggtcagccttgt

SEQ ID NO: 5635 - RNA, 22 nt, synthetic construct
  source 1..22: mol_type = other RNA
ttccgtctggactccaactgct

SEQ ID NO: 5636 - RNA, 22 nt, synthetic construct
  source 1..22: mol_type = other RNA
ttcgggtatcagcagtgcagga

SEQ ID NO: 5637 - RNA, 22 nt, synthetic construct
  source 1..22: mol_type = other RNA
ttctgcaggtgttgtcgggcct

SEQ ID NO: 5638 - RNA, 22 nt, synthetic construct
  source 1..22: mol_type = other RNA
ttctgcgtacaaagggctgcac

SEQ ID NO: 5639 - RNA, 22 nt, synthetic construct
  source 1..22: mol_type = other RNA
ttctggcatcttctgcaggtgt

SEQ ID NO: 5640 - RNA, 22 nt, synthetic construct
  source 1..22: mol_type = other RNA
ttcttagtacgtgacagcacgc

SEQ ID NO: 5641 - RNA, 22 nt, synthetic construct
  source 1..22: mol_type = other RNA
ttgagtatgccgactccagctt

SEQ ID NO: 5642 - RNA, 22 nt, synthetic construct
  source 1..22: mol_type = other RNA
ttgatgacaaggcggcacaggt

SEQ ID NO: 5643 - RNA, 22 nt, synthetic construct
  source 1..22: mol_type = other RNA
ttgcaggctgcgggcactgctt

SEQ ID NO: 5644 - RNA, 22 nt, synthetic construct
  source 1..22: mol_type = other RNA
ttgccccgtacagtcagagctg

SEQ ID NO: 5645 - RNA, 22 nt, synthetic construct
  source 1..22: mol_type = other RNA
ttgcctaggctggtattggggt

SEQ ID NO: 5646 - RNA, 22 nt, synthetic construct
  source 1..22: mol_type = other RNA
ttggagtccagacggaagctgg

SEQ ID NO: 5647 - RNA, 22 nt, synthetic construct
  source 1..22: mol_type = other RNA
ttggccccctctgcacttgcct

SEQ ID NO: 5648 - RNA, 22 nt, synthetic construct
  source 1..22: mol_type = other RNA
ttggggttccattacggccagc

SEQ ID NO: 5649 - RNA, 22 nt, synthetic construct
  source 1..22: mol_type = other RNA
ttggtggggccacgagtggttt

SEQ ID NO: 5650 - RNA, 22 nt, synthetic construct
  source 1..22: mol_type = other RNA
ttgtacgcagaagcagtgcccg

SEQ ID NO: 5651 - RNA, 22 nt, synthetic construct
  source 1..22: mol_type = other RNA
ttgtcatcaaccgtctggtggc

SEQ ID NO: 5652 - RNA, 22 nt, synthetic construct
  source 1..22: mol_type = other RNA
ttgtccaggccacgcatcctgg

SEQ ID NO: 5653 - RNA, 22 nt, synthetic construct
  source 1..22: mol_type = other RNA
ttgtcgggcctcgctggccgta

SEQ ID NO: 5654 - RNA, 22 nt, synthetic construct
  source 1..22: mol_type = other RNA
ttgtgcagcactatgtggcctc

SEQ ID NO: 5655 - RNA, 22 nt, synthetic construct
  source 1..22: mol_type = other RNA
tttaggtgtacagcagtggctg

SEQ ID NO: 5656 - RNA, 22 nt, synthetic construct
  source 1..22: mol_type = other RNA
tttcactgacagcgtgaacagg

SEQ ID NO: 5657 - RNA, 22 nt, synthetic construct
  source 1..22: mol_type = other RNA
tttccggatgtggtcagccttg

SEQ ID NO: 5658 - RNA, 22 nt, synthetic construct
  source 1..22: mol_type = other RNA
tttgtacgcagaagcagtgccc

SEQ ID NO: 5659 - RNA, 22 nt, synthetic construct
  source 1..22: mol_type = other RNA
ttttaggtgtacagcagtggct

SEQ ID NO: 5660 - RNA, 22 nt, synthetic construct
  source 1..22: mol_type = other RNA
ttttcactgacagcgtgaacag

SEQ ID NO: 5661 - RNA, 20 nt, synthetic construct
  source 1..20: mol_type = other RNA
aaaggcagaactaagcttct

SEQ ID NO: 5662 - RNA, 20 nt, synthetic construct
  source 1..20: mol_type = other RNA
aaatcagactcaaaggcaga

SEQ ID NO: 5663 - RNA, 20 nt, synthetic construct
  source 1..20: mol_type = other RNA
aaattagctggggtaaccaa

SEQ ID NO: 5664 - RNA, 20 nt, synthetic construct
  source 1..20: mol_type = other RNA
aaccaatccagtgcaagtca

SEQ ID NO: 5665 - RNA, 20 nt, synthetic construct
  source 1..20: mol_type = other RNA
aactaagcttctcccaccag

SEQ ID NO: 5666 - RNA, 20 nt, synthetic construct
  source 1..20: mol_type = other RNA
aagcgtgaagctggaggcac

SEQ ID NO: 5667 - RNA, 20 nt, synthetic construct
  source 1..20: mol_type = other RNA
aagctggaggcactgccttg

SEQ ID NO: 5668 - RNA, 20 nt, synthetic construct
  source 1..20: mol_type = other RNA
aagcttagttctgcctttga

SEQ ID NO: 5669 - RNA, 20 nt, synthetic construct
  source 1..20: mol_type = other RNA
aagcttctcccaccagacta

SEQ ID NO: 5670 - RNA, 20 nt, synthetic construct
  source 1..20: mol_type = other RNA
aaggcagaactaagcttctc

SEQ ID NO: 5671 - RNA, 20 nt, synthetic construct
  source 1..20: mol_type = other RNA
aaggcagtgcctccagcttc

SEQ ID NO: 5672 - RNA, 20 nt, synthetic construct
  source 1..20: mol_type = other RNA
aagggacatagtggaaatta

SEQ ID NO: 5673 - RNA, 20 nt, synthetic construct
  source 1..20: mol_type = other RNA
aagtcaaggcagtgcctcca

SEQ ID NO: 5674 - RNA, 20 nt, synthetic construct
  source 1..20: mol_type = other RNA
aagtgcagagggggccaagg

SEQ ID NO: 5675 - RNA, 20 nt, synthetic construct
  source 1..20: mol_type = other RNA
aatcagactcaaaggcagaa

SEQ ID NO: 5676 - RNA, 20 nt, synthetic construct
  source 1..20: mol_type = other RNA
aatccagtgcaagtcaaggc

SEQ ID NO: 5677 - RNA, 20 nt, synthetic construct
  source 1..20: mol_type = other RNA
aattagctggggtaaccaat

SEQ ID NO: 5678 - RNA, 20 nt, synthetic construct
  source 1..20: mol_type = other RNA
aatttccactatgtcccttg

SEQ ID NO: 5679 - RNA, 20 nt, synthetic construct
  source 1..20: mol_type = other RNA
acagccctctctagggaagc

SEQ ID NO: 5680 - RNA, 20 nt, synthetic construct
  source 1..20: mol_type = other RNA
acatagtggaaattagctgg

SEQ ID NO: 5681 - RNA, 20 nt, synthetic construct
  source 1..20: mol_type = other RNA
accaatccagtgcaagtcaa

SEQ ID NO: 5682 - RNA, 20 nt, synthetic construct
  source 1..20: mol_type = other RNA
accagactactcaggaaaag

SEQ ID NO: 5683 - RNA, 20 nt, synthetic construct
  source 1..20: mol_type = other RNA
accccagctaatttccacta

SEQ ID NO: 5684 - RNA, 20 nt, synthetic construct
  source 1..20: mol_type = other RNA
acgcttccctagagagggct

SEQ ID NO: 5685 - RNA, 20 nt, synthetic construct
  source 1..20: mol_type = other RNA
actaagcttctcccaccaga

SEQ ID NO: 5686 - RNA, 20 nt, synthetic construct
  source 1..20: mol_type = other RNA
actactcaggaaaaggcctg

SEQ ID NO: 5687 - RNA, 20 nt, synthetic construct
  source 1..20: mol_type = other RNA
actatgtcccttggccccct

SEQ ID NO: 5688 - RNA, 20 nt, synthetic construct
  source 1..20: mol_type = other RNA
actcaaaggcagaactaagc

SEQ ID NO: 5689 - RNA, 20 nt, synthetic construct
  source 1..20: mol_type = other RNA
actcaggaaaaggcctgcct

SEQ ID NO: 5690 - RNA, 20 nt, synthetic construct
  source 1..20: mol_type = other RNA
actctcctgggccgggctat

SEQ ID NO: 5691 - RNA, 20 nt, synthetic construct
  source 1..20: mol_type = other RNA
actgccttgacttgcactgg

SEQ ID NO: 5692 - RNA, 20 nt, synthetic construct
  source 1..20: mol_type = other RNA
actggattggttaccccagc

SEQ ID NO: 5693 - RNA, 20 nt, synthetic construct
  source 1..20: mol_type = other RNA
acttgcactggattggttac

SEQ ID NO: 5694 - RNA, 20 nt, synthetic construct
  source 1..20: mol_type = other RNA
agaactaagcttctcccacc

SEQ ID NO: 5695 - RNA, 20 nt, synthetic construct
  source 1..20: mol_type = other RNA
agaagcttagttctgccttt

SEQ ID NO: 5696 - RNA, 20 nt, synthetic construct
  source 1..20: mol_type = other RNA
agactactcaggaaaaggcc

SEQ ID NO: 5697 - RNA, 20 nt, synthetic construct
  source 1..20: mol_type = other RNA
agactcaaaggcagaactaa

SEQ ID NO: 5698 - RNA, 20 nt, synthetic construct
  source 1..20: mol_type = other RNA
agactctcctgggccgggct

SEQ ID NO: 5699 - RNA, 20 nt, synthetic construct
  source 1..20: mol_type = other RNA
agagagggctgtgcctctcc

SEQ ID NO: 5700 - RNA, 20 nt, synthetic construct
  source 1..20: mol_type = other RNA
agaggcacagccctctctag

SEQ ID NO: 5701 - RNA, 20 nt, synthetic construct
  source 1..20: mol_type = other RNA
agagggctgtgcctctccca

SEQ ID NO: 5702 - RNA, 20 nt, synthetic construct
  source 1..20: mol_type = other RNA
agagggggccaagggacata

SEQ ID NO: 5703 - RNA, 20 nt, synthetic construct
  source 1..20: mol_type = other RNA
agagtctgatgggagaggca

SEQ ID NO: 5704 - RNA, 20 nt, synthetic construct
  source 1..20: mol_type = other RNA
agcccggcccaggagagtct

SEQ ID NO: 5705 - RNA, 20 nt, synthetic construct
  source 1..20: mol_type = other RNA
agccctctctagggaagcgt

SEQ ID NO: 5706 - RNA, 20 nt, synthetic construct
  source 1..20: mol_type = other RNA
agcgtgaagctggaggcact

SEQ ID NO: 5707 - RNA, 20 nt, synthetic construct
  source 1..20: mol_type = other RNA
agctaatttccactatgtcc

SEQ ID NO: 5708 - RNA, 20 nt, synthetic construct
  source 1..20: mol_type = other RNA
agctggaggcactgccttga

SEQ ID NO: 5709 - RNA, 20 nt, synthetic construct
  source 1..20: mol_type = other RNA
agctggggtaaccaatccag

SEQ ID NO: 5710 - RNA, 20 nt, synthetic construct
  source 1..20: mol_type = other RNA
agcttagttctgcctttgag

SEQ ID NO: 5711 - RNA, 20 nt, synthetic construct
  source 1..20: mol_type = other RNA
agcttcacgcttccctagag

SEQ ID NO: 5712 - RNA, 20 nt, synthetic construct
  source 1..20: mol_type = other RNA
agcttctcccaccagactac

SEQ ID NO: 5713 - RNA, 20 nt, synthetic construct
  source 1..20: mol_type = other RNA
aggagagtctgatgggagag

SEQ ID NO: 5714 - RNA, 20 nt, synthetic construct
  source 1..20: mol_type = other RNA
aggcacagccctctctaggg

SEQ ID NO: 5715 - RNA, 20 nt, synthetic construct
  source 1..20: mol_type = other RNA
aggcactgccttgacttgca

SEQ ID NO: 5716 - RNA, 20 nt, synthetic construct
  source 1..20: mol_type = other RNA
aggcagaactaagcttctcc

SEQ ID NO: 5717 - RNA, 20 nt, synthetic construct
  source 1..20: mol_type = other RNA
aggcaggccttttcctgagt

SEQ ID NO: 5718 - RNA, 20 nt, synthetic construct
  source 1..20: mol_type = other RNA
aggcagtgcctccagcttca

SEQ ID NO: 5719 - RNA, 20 nt, synthetic construct
  source 1..20: mol_type = other RNA
aggcatagcccggcccagga

SEQ ID NO: 5720 - RNA, 20 nt, synthetic construct
  source 1..20: mol_type = other RNA
aggccttttcctgagtagtc

SEQ ID NO: 5721 - RNA, 20 nt, synthetic construct
  source 1..20: mol_type = other RNA
agggaagcgtgaagctggag

SEQ ID NO: 5722 - RNA, 20 nt, synthetic construct
  source 1..20: mol_type = other RNA
agggacatagtggaaattag

SEQ ID NO: 5723 - RNA, 20 nt, synthetic construct
  source 1..20: mol_type = other RNA
agggctgtgcctctcccatc

SEQ ID NO: 5724 - RNA, 20 nt, synthetic construct
  source 1..20: mol_type = other RNA
agggggccaagggacatagt

SEQ ID NO: 5725 - RNA, 20 nt, synthetic construct
  source 1..20: mol_type = other RNA
aggggggaggcaggcctttt

SEQ ID NO: 5726 - RNA, 20 nt, synthetic construct
  source 1..20: mol_type = other RNA
agtagtctggtgggagaagc

SEQ ID NO: 5727 - RNA, 20 nt, synthetic construct
  source 1..20: mol_type = other RNA
agtcaaggcagtgcctccag

SEQ ID NO: 5728 - RNA, 20 nt, synthetic construct
  source 1..20: mol_type = other RNA
agtctgatgggagaggcaca

SEQ ID NO: 5729 - RNA, 20 nt, synthetic construct
  source 1..20: mol_type = other RNA
agtctgatttgggaggcata

SEQ ID NO: 5730 - RNA, 20 nt, synthetic construct
  source 1..20: mol_type = other RNA
agtctggtgggagaagctta

SEQ ID NO: 5731 - RNA, 20 nt, synthetic construct
  source 1..20: mol_type = other RNA
agtgcaagtcaaggcagtgc

SEQ ID NO: 5732 - RNA, 20 nt, synthetic construct
  source 1..20: mol_type = other RNA
agtgcagagggggccaaggg

SEQ ID NO: 5733 - RNA, 20 nt, synthetic construct
  source 1..20: mol_type = other RNA
agtgcctccagcttcacgct

SEQ ID NO: 5734 - RNA, 20 nt, synthetic construct
  source 1..20: mol_type = other RNA
agtggaaattagctggggta

SEQ ID NO: 5735 - RNA, 20 nt, synthetic construct
  source 1..20: mol_type = other RNA
agttctgcctttgagtctga

SEQ ID NO: 5736 - RNA, 20 nt, synthetic construct
  source 1..20: mol_type = other RNA
atagcccggcccaggagagt

SEQ ID NO: 5737 - RNA, 20 nt, synthetic construct
  source 1..20: mol_type = other RNA
atagtggaaattagctgggg

SEQ ID NO: 5738 - RNA, 20 nt, synthetic construct
  source 1..20: mol_type = other RNA
atcagactcaaaggcagaac

SEQ ID NO: 5739 - RNA, 20 nt, synthetic construct
  source 1..20: mol_type = other RNA
atcagactctcctgggccgg

SEQ ID NO: 5740 - RNA, 20 nt, synthetic construct
  source 1..20: mol_type = other RNA
atccagtgcaagtcaaggca

SEQ ID NO: 5741 - RNA, 20 nt, synthetic construct
  source 1..20: mol_type = other RNA
atgcctcccaaatcagactc

SEQ ID NO: 5742 - RNA, 20 nt, synthetic construct
  source 1..20: mol_type = other RNA
atgggagaggcacagccctc

SEQ ID NO: 5743 - RNA, 20 nt, synthetic construct
  source 1..20: mol_type = other RNA
attagctggggtaaccaatc

SEQ ID NO: 5744 - RNA, 20 nt, synthetic construct
  source 1..20: mol_type = other RNA
attggttaccccagctaatt

SEQ ID NO: 5745 - RNA, 20 nt, synthetic construct
  source 1..20: mol_type = other RNA
atttccactatgtcccttgg

SEQ ID NO: 5746 - RNA, 20 nt, synthetic construct
  source 1..20: mol_type = other RNA
atttgggaggcatagcccgg

SEQ ID NO: 5747 - RNA, 20 nt, synthetic construct
  source 1..20: mol_type = other RNA
caaaggcagaactaagcttc

SEQ ID NO: 5748 - RNA, 20 nt, synthetic construct
  source 1..20: mol_type = other RNA
caaatcagactcaaaggcag

SEQ ID NO: 5749 - RNA, 20 nt, synthetic construct
  source 1..20: mol_type = other RNA
caaggcagtgcctccagctt

SEQ ID NO: 5750 - RNA, 20 nt, synthetic construct
  source 1..20: mol_type = other RNA
caagggacatagtggaaatt

SEQ ID NO: 5751 - RNA, 20 nt, synthetic construct
  source 1..20: mol_type = other RNA
caagtcaaggcagtgcctcc

SEQ ID NO: 5752 - RNA, 20 nt, synthetic construct
  source 1..20: mol_type = other RNA
caagtgcagagggggccaag

SEQ ID NO: 5753 - RNA, 20 nt, synthetic construct
  source 1..20: mol_type = other RNA
caatccagtgcaagtcaagg

SEQ ID NO: 5754 - RNA, 20 nt, synthetic construct
  source 1..20: mol_type = other RNA
cacagccctctctagggaag

SEQ ID NO: 5755 - RNA, 20 nt, synthetic construct
  source 1..20: mol_type = other RNA
caccagactactcaggaaaa

SEQ ID NO: 5756 - RNA, 20 nt, synthetic construct
  source 1..20: mol_type = other RNA
cacgcttccctagagagggc

SEQ ID NO: 5757 - RNA, 20 nt, synthetic construct
  source 1..20: mol_type = other RNA
cactatgtcccttggccccc

SEQ ID NO: 5758 - RNA, 20 nt, synthetic construct
  source 1..20: mol_type = other RNA
cactgccttgacttgcactg

SEQ ID NO: 5759 - RNA, 20 nt, synthetic construct
  source 1..20: mol_type = other RNA
cactggattggttaccccag

SEQ ID NO: 5760 - RNA, 20 nt, synthetic construct
  source 1..20: mol_type = other RNA
cagaactaagcttctcccac

SEQ ID NO: 5761 - RNA, 20 nt, synthetic construct
  source 1..20: mol_type = other RNA
cagactactcaggaaaaggc

SEQ ID NO: 5762 - RNA, 20 nt, synthetic construct
  source 1..20: mol_type = other RNA
cagactcaaaggcagaacta

SEQ ID NO: 5763 - RNA, 20 nt, synthetic construct
  source 1..20: mol_type = other RNA
cagactctcctgggccgggc

SEQ ID NO: 5764 - RNA, 20 nt, synthetic construct
  source 1..20: mol_type = other RNA
cagagggggccaagggacat

SEQ ID NO: 5765 - RNA, 20 nt, synthetic construct
  source 1..20: mol_type = other RNA
cagccctctctagggaagcg

SEQ ID NO: 5766 - RNA, 20 nt, synthetic construct
  source 1..20: mol_type = other RNA
cagctaatttccactatgtc

SEQ ID NO: 5767 - RNA, 20 nt, synthetic construct
  source 1..20: mol_type = other RNA
cagcttcacgcttccctaga

SEQ ID NO: 5768 - RNA, 20 nt, synthetic construct
  source 1..20: mol_type = other RNA
caggaaaaggcctgcctccc

SEQ ID NO: 5769 - RNA, 20 nt, synthetic construct
  source 1..20: mol_type = other RNA
caggagagtctgatgggaga

SEQ ID NO: 5770 - RNA, 20 nt, synthetic construct
  source 1..20: mol_type = other RNA
caggccttttcctgagtagt

SEQ ID NO: 5771 - RNA, 20 nt, synthetic construct
  source 1..20: mol_type = other RNA
cagtgcaagtcaaggcagtg

SEQ ID NO: 5772 - RNA, 20 nt, synthetic construct
  source 1..20: mol_type = other RNA
cagtgcctccagcttcacgc

SEQ ID NO: 5773 - RNA, 20 nt, synthetic construct
  source 1..20: mol_type = other RNA
catagcccggcccaggagag

SEQ ID NO: 5774 - RNA, 20 nt, synthetic construct
  source 1..20: mol_type = other RNA
catagtggaaattagctggg

SEQ ID NO: 5775 - RNA, 20 nt, synthetic construct
  source 1..20: mol_type = other RNA
catcagactctcctgggccg

SEQ ID NO: 5776 - RNA, 20 nt, synthetic construct
  source 1..20: mol_type = other RNA
ccaaatcagactcaaaggca

SEQ ID NO: 5777 - RNA, 20 nt, synthetic construct
  source 1..20: mol_type = other RNA
ccaagggacatagtggaaat

SEQ ID NO: 5778 - RNA, 20 nt, synthetic construct
  source 1..20: mol_type = other RNA
ccaatccagtgcaagtcaag

SEQ ID NO: 5779 - RNA, 20 nt, synthetic construct
  source 1..20: mol_type = other RNA
ccaccagactactcaggaaa

SEQ ID NO: 5780 - RNA, 20 nt, synthetic construct
  source 1..20: mol_type = other RNA
ccactatgtcccttggcccc

SEQ ID NO: 5781 - RNA, 20 nt, synthetic construct
  source 1..20: mol_type = other RNA
ccagactactcaggaaaagg

SEQ ID NO: 5782 - RNA, 20 nt, synthetic construct
  source 1..20: mol_type = other RNA
ccagctaatttccactatgt

SEQ ID NO: 5783 - RNA, 20 nt, synthetic construct
  source 1..20: mol_type = other RNA
ccagcttcacgcttccctag

SEQ ID NO: 5784 - RNA, 20 nt, synthetic construct
  source 1..20: mol_type = other RNA
ccaggagagtctgatgggag

SEQ ID NO: 5785 - RNA, 20 nt, synthetic construct
  source 1..20: mol_type = other RNA
ccagtgcaagtcaaggcagt

SEQ ID NO: 5786 - RNA, 20 nt, synthetic construct
  source 1..20: mol_type = other RNA
ccatcagactctcctgggcc

SEQ ID NO: 5787 - RNA, 20 nt, synthetic construct
  source 1..20: mol_type = other RNA
cccaaatcagactcaaaggc

SEQ ID NO: 5788 - RNA, 20 nt, synthetic construct
  source 1..20: mol_type = other RNA
cccaccagactactcaggaa

SEQ ID NO: 5789 - RNA, 20 nt, synthetic construct
  source 1..20: mol_type = other RNA
cccagctaatttccactatg

SEQ ID NO: 5790 - RNA, 20 nt, synthetic construct
  source 1..20: mol_type = other RNA
cccaggagagtctgatggga

SEQ ID NO: 5791 - RNA, 20 nt, synthetic construct
  source 1..20: mol_type = other RNA
cccatcagactctcctgggc

SEQ ID NO: 5792 - RNA, 20 nt, synthetic construct
  source 1..20: mol_type = other RNA
ccccagctaatttccactat

SEQ ID NO: 5793 - RNA, 20 nt, synthetic construct
  source 1..20: mol_type = other RNA
cccggcccaggagagtctga

SEQ ID NO: 5794 - RNA, 20 nt, synthetic construct
  source 1..20: mol_type = other RNA
ccctagagagggctgtgcct

SEQ ID NO: 5795 - RNA, 20 nt, synthetic construct
  source 1..20: mol_type = other RNA
ccctctctagggaagcgtga

SEQ ID NO: 5796 - RNA, 20 nt, synthetic construct
  source 1..20: mol_type = other RNA
ccggcccaggagagtctgat

SEQ ID NO: 5797 - RNA, 20 nt, synthetic construct
  source 1..20: mol_type = other RNA
ccgggctatgcctcccaaat

SEQ ID NO: 5798 - RNA, 20 nt, synthetic construct
  source 1..20: mol_type = other RNA
cctagagagggctgtgcctc

SEQ ID NO: 5799 - RNA, 20 nt, synthetic construct
  source 1..20: mol_type = other RNA
cctccagcttcacgcttccc

SEQ ID NO: 5800 - RNA, 20 nt, synthetic construct
  source 1..20: mol_type = other RNA
cctcccaaatcagactcaaa

SEQ ID NO: 5801 - RNA, 20 nt, synthetic construct
  source 1..20: mol_type = other RNA
cctctcccatcagactctcc

SEQ ID NO: 5802 - RNA, 20 nt, synthetic construct
  source 1..20: mol_type = other RNA
cctctctagggaagcgtgaa

SEQ ID NO: 5803 - RNA, 20 nt, synthetic construct
  source 1..20: mol_type = other RNA
cctgagtagtctggtgggag

SEQ ID NO: 5804 - RNA, 20 nt, synthetic construct
  source 1..20: mol_type = other RNA
cctgggccgggctatgcctc

SEQ ID NO: 5805 - RNA, 20 nt, synthetic construct
  source 1..20: mol_type = other RNA
ccttgacttgcactggattg

SEQ ID NO: 5806 - RNA, 20 nt, synthetic construct
  source 1..20: mol_type = other RNA
cctttgagtctgatttggga

SEQ ID NO: 5807 - RNA, 20 nt, synthetic construct
  source 1..20: mol_type = other RNA
ccttttcctgagtagtctgg

SEQ ID NO: 5808 - RNA, 20 nt, synthetic construct
  source 1..20: mol_type = other RNA
cgcttccctagagagggctg

SEQ ID NO: 5809 - RNA, 20 nt, synthetic construct
  source 1..20: mol_type = other RNA
cggcccaggagagtctgatg

SEQ ID NO: 5810 - RNA, 20 nt, synthetic construct
  source 1..20: mol_type = other RNA
cgggctatgcctcccaaatc

SEQ ID NO: 5811 - RNA, 20 nt, synthetic construct
  source 1..20: mol_type = other RNA
cgtgaagctggaggcactgc

SEQ ID NO: 5812 - RNA, 20 nt, synthetic construct
  source 1..20: mol_type = other RNA
ctaagcttctcccaccagac

SEQ ID NO: 5813 - RNA, 20 nt, synthetic construct
  source 1..20: mol_type = other RNA
ctaatttccactatgtccct

SEQ ID NO: 5814 - RNA, 20 nt, synthetic construct
  source 1..20: mol_type = other RNA
ctactcaggaaaaggcctgc

SEQ ID NO: 5815 - RNA, 20 nt, synthetic construct
  source 1..20: mol_type = other RNA
ctagagagggctgtgcctct

SEQ ID NO: 5816 - RNA, 20 nt, synthetic construct
  source 1..20: mol_type = other RNA
ctagggaagcgtgaagctgg

SEQ ID NO: 5817 - RNA, 20 nt, synthetic construct
  source 1..20: mol_type = other RNA
ctatgcctcccaaatcagac

SEQ ID NO: 5818 - RNA, 20 nt, synthetic construct
  source 1..20: mol_type = other RNA
ctatgtcccttggccccctc

SEQ ID NO: 5819 - RNA, 20 nt, synthetic construct
  source 1..20: mol_type = other RNA
ctcaaaggcagaactaagct

SEQ ID NO: 5820 - RNA, 20 nt, synthetic construct
  source 1..20: mol_type = other RNA
ctcaggaaaaggcctgcctc

SEQ ID NO: 5821 - RNA, 20 nt, synthetic construct
  source 1..20: mol_type = other RNA
ctccagcttcacgcttccct

SEQ ID NO: 5822 - RNA, 20 nt, synthetic construct
  source 1..20: mol_type = other RNA
ctcccaaatcagactcaaag

SEQ ID NO: 5823 - RNA, 20 nt, synthetic construct
  source 1..20: mol_type = other RNA
ctcccaccagactactcagg

SEQ ID NO: 5824 - RNA, 20 nt, synthetic construct
  source 1..20: mol_type = other RNA
ctcccatcagactctcctgg

SEQ ID NO: 5825 - RNA, 20 nt, synthetic construct
  source 1..20: mol_type = other RNA
ctcctgggccgggctatgcc

SEQ ID NO: 5826 - RNA, 20 nt, synthetic construct
  source 1..20: mol_type = other RNA
ctctagggaagcgtgaagct

SEQ ID NO: 5827 - RNA, 20 nt, synthetic construct
  source 1..20: mol_type = other RNA
ctctcccatcagactctcct

SEQ ID NO: 5828 - RNA, 20 nt, synthetic construct
  source 1..20: mol_type = other RNA
ctctcctgggccgggctatg

SEQ ID NO: 5829 - RNA, 20 nt, synthetic construct
  source 1..20: mol_type = other RNA
ctctctagggaagcgtgaag

SEQ ID NO: 5830 - RNA, 20 nt, synthetic construct
  source 1..20: mol_type = other RNA
ctgaggggggaggcaggcct

SEQ ID NO: 5831 - RNA, 20 nt, synthetic construct
  source 1..20: mol_type = other RNA
ctgagtagtctggtgggaga

SEQ ID NO: 5832 - RNA, 20 nt, synthetic construct
  source 1..20: mol_type = other RNA
ctgatgggagaggcacagcc

SEQ ID NO: 5833 - RNA, 20 nt, synthetic construct
  source 1..20: mol_type = other RNA
ctgatttgggaggcatagcc

SEQ ID NO: 5834 - RNA, 20 nt, synthetic construct
  source 1..20: mol_type = other RNA
ctgccttgacttgcactgga

SEQ ID NO: 5835 - RNA, 20 nt, synthetic construct
  source 1..20: mol_type = other RNA
ctgcctttgagtctgatttg

SEQ ID NO: 5836 - RNA, 20 nt, synthetic construct
  source 1..20: mol_type = other RNA
ctggaggcactgccttgact

SEQ ID NO: 5837 - RNA, 20 nt, synthetic construct
  source 1..20: mol_type = other RNA
ctggattggttaccccagct

SEQ ID NO: 5838 - RNA, 20 nt, synthetic construct
  source 1..20: mol_type = other RNA
ctgggccgggctatgcctcc

SEQ ID NO: 5839 - RNA, 20 nt, synthetic construct
  source 1..20: mol_type = other RNA
ctggggtaaccaatccagtg

SEQ ID NO: 5840 - RNA, 20 nt, synthetic construct
  source 1..20: mol_type = other RNA
ctggtgggagaagcttagtt

SEQ ID NO: 5841 - RNA, 20 nt, synthetic construct
  source 1..20: mol_type = other RNA
ctgtgcctctcccatcagac

SEQ ID NO: 5842 - RNA, 20 nt, synthetic construct
  source 1..20: mol_type = other RNA
cttagttctgcctttgagtc

SEQ ID NO: 5843 - RNA, 20 nt, synthetic construct
  source 1..20: mol_type = other RNA
cttcacgcttccctagagag

SEQ ID NO: 5844 - RNA, 20 nt, synthetic construct
  source 1..20: mol_type = other RNA
cttccctagagagggctgtg

SEQ ID NO: 5845 - RNA, 20 nt, synthetic construct
  source 1..20: mol_type = other RNA
cttctcccaccagactactc

SEQ ID NO: 5846 - RNA, 20 nt, synthetic construct
  source 1..20: mol_type = other RNA
cttgacttgcactggattgg

SEQ ID NO: 5847 - RNA, 20 nt, synthetic construct
  source 1..20: mol_type = other RNA
cttgcactggattggttacc

SEQ ID NO: 5848 - RNA, 20 nt, synthetic construct
  source 1..20: mol_type = other RNA
ctttgagtctgatttgggag

SEQ ID NO: 5849 - RNA, 20 nt, synthetic construct
  source 1..20: mol_type = other RNA
cttttcctgagtagtctggt

SEQ ID NO: 5850 - RNA, 20 nt, synthetic construct
  source 1..20: mol_type = other RNA
gaaattagctggggtaacca

SEQ ID NO: 5851 - RNA, 20 nt, synthetic construct
  source 1..20: mol_type = other RNA
gaactaagcttctcccacca

SEQ ID NO: 5852 - RNA, 20 nt, synthetic construct
  source 1..20: mol_type = other RNA
gaagcgtgaagctggaggca

SEQ ID NO: 5853 - RNA, 20 nt, synthetic construct
  source 1..20: mol_type = other RNA
gaagctggaggcactgcctt

SEQ ID NO: 5854 - RNA, 20 nt, synthetic construct
  source 1..20: mol_type = other RNA
gaagcttagttctgcctttg

SEQ ID NO: 5855 - RNA, 20 nt, synthetic construct
  source 1..20: mol_type = other RNA
gacatagtggaaattagctg

SEQ ID NO: 5856 - RNA, 20 nt, synthetic construct
  source 1..20: mol_type = other RNA
gactactcaggaaaaggcct

SEQ ID NO: 5857 - RNA, 20 nt, synthetic construct
  source 1..20: mol_type = other RNA
gactcaaaggcagaactaag

SEQ ID NO: 5858 - RNA, 20 nt, synthetic construct
  source 1..20: mol_type = other RNA
gactctcctgggccgggcta

SEQ ID NO: 5859 - RNA, 20 nt, synthetic construct
  source 1..20: mol_type = other RNA
gacttgcactggattggtta

SEQ ID NO: 5860 - RNA, 20 nt, synthetic construct
  source 1..20: mol_type = other RNA
gagaagcttagttctgcctt

SEQ ID NO: 5861 - RNA, 20 nt, synthetic construct
  source 1..20: mol_type = other RNA
gagaggcacagccctctcta

SEQ ID NO: 5862 - RNA, 20 nt, synthetic construct
  source 1..20: mol_type = other RNA
gagagggctgtgcctctccc

SEQ ID NO: 5863 - RNA, 20 nt, synthetic construct
  source 1..20: mol_type = other RNA
gagagtctgatgggagaggc

SEQ ID NO: 5864 - RNA, 20 nt, synthetic construct
  source 1..20: mol_type = other RNA
gaggcacagccctctctagg

SEQ ID NO: 5865 - RNA, 20 nt, synthetic construct
  source 1..20: mol_type = other RNA
gaggcactgccttgacttgc

SEQ ID NO: 5866 - RNA, 20 nt, synthetic construct
  source 1..20: mol_type = other RNA
gaggcaggccttttcctgag

SEQ ID NO: 5867 - RNA, 20 nt, synthetic construct
  source 1..20: mol_type = other RNA
gaggcatagcccggcccagg

SEQ ID NO: 5868 - RNA, 20 nt, synthetic construct
  source 1..20: mol_type = other RNA
gagggctgtgcctctcccat

SEQ ID NO: 5869 - RNA, 20 nt, synthetic construct
  source 1..20: mol_type = other RNA
gagggggccaagggacatag

SEQ ID NO: 5870 - RNA, 20 nt, synthetic construct
  source 1..20: mol_type = other RNA
gaggggggaggcaggccttt

SEQ ID NO: 5871 - RNA, 20 nt, synthetic construct
  source 1..20: mol_type = other RNA
gagtagtctggtgggagaag

SEQ ID NO: 5872 - RNA, 20 nt, synthetic construct
  source 1..20: mol_type = other RNA
gagtctgatgggagaggcac

SEQ ID NO: 5873 - RNA, 20 nt, synthetic construct
  source 1..20: mol_type = other RNA
gagtctgatttgggaggcat

SEQ ID NO: 5874 - RNA, 20 nt, synthetic construct
  source 1..20: mol_type = other RNA
gatgggagaggcacagccct

SEQ ID NO: 5875 - RNA, 20 nt, synthetic construct
  source 1..20: mol_type = other RNA
gattggttaccccagctaat

SEQ ID NO: 5876 - RNA, 20 nt, synthetic construct
  source 1..20: mol_type = other RNA
gatttgggaggcatagcccg

SEQ ID NO: 5877 - RNA, 20 nt, synthetic construct
  source 1..20: mol_type = other RNA
gcaagtcaaggcagtgcctc

SEQ ID NO: 5878 - RNA, 20 nt, synthetic construct
  source 1..20: mol_type = other RNA
gcaagtgcagagggggccaa

SEQ ID NO: 5879 - RNA, 20 nt, synthetic construct
  source 1..20: mol_type = other RNA
gcacagccctctctagggaa

SEQ ID NO: 5880 - RNA, 20 nt, synthetic construct
  source 1..20: mol_type = other RNA
gcactgccttgacttgcact

SEQ ID NO: 5881 - RNA, 20 nt, synthetic construct
  source 1..20: mol_type = other RNA
gcactggattggttacccca

SEQ ID NO: 5882 - RNA, 20 nt, synthetic construct
  source 1..20: mol_type = other RNA
gcagaactaagcttctccca

SEQ ID NO: 5883 - RNA, 20 nt, synthetic construct
  source 1..20: mol_type = other RNA
gcagagggggccaagggaca

SEQ ID NO: 5884 - RNA, 20 nt, synthetic construct
  source 1..20: mol_type = other RNA
gcaggccttttcctgagtag

SEQ ID NO: 5885 - RNA, 20 nt, synthetic construct
  source 1..20: mol_type = other RNA
gcagtgcctccagcttcacg

SEQ ID NO: 5886 - RNA, 20 nt, synthetic construct
  source 1..20: mol_type = other RNA
gcatagcccggcccaggaga

SEQ ID NO: 5887 - RNA, 20 nt, synthetic construct
  source 1..20: mol_type = other RNA
gccaagggacatagtggaaa

SEQ ID NO: 5888 - RNA, 20 nt, synthetic construct
  source 1..20: mol_type = other RNA
gcccaggagagtctgatggg

SEQ ID NO: 5889 - RNA, 20 nt, synthetic construct
  source 1..20: mol_type = other RNA
gcccggcccaggagagtctg

SEQ ID NO: 5890 - RNA, 20 nt, synthetic construct
  source 1..20: mol_type = other RNA
gccctctctagggaagcgtg

SEQ ID NO: 5891 - RNA, 20 nt, synthetic construct
  source 1..20: mol_type = other RNA
gccgggctatgcctcccaaa

SEQ ID NO: 5892 - RNA, 20 nt, synthetic construct
  source 1..20: mol_type = other RNA
gcctccagcttcacgcttcc

SEQ ID NO: 5893 - RNA, 20 nt, synthetic construct
  source 1..20: mol_type = other RNA
gcctcccaaatcagactcaa

SEQ ID NO: 5894 - RNA, 20 nt, synthetic construct
  source 1..20: mol_type = other RNA
gcctctcccatcagactctc

SEQ ID NO: 5895 - RNA, 20 nt, synthetic construct
  source 1..20: mol_type = other RNA
gccttgacttgcactggatt

SEQ ID NO: 5896 - RNA, 20 nt, synthetic construct
  source 1..20: mol_type = other RNA
gcctttgagtctgatttggg

SEQ ID NO: 5897 - RNA, 20 nt, synthetic construct
  source 1..20: mol_type = other RNA
gccttttcctgagtagtctg

SEQ ID NO: 5898 - RNA, 20 nt, synthetic construct
  source 1..20: mol_type = other RNA
gcgtgaagctggaggcactg

SEQ ID NO: 5899 - RNA, 20 nt, synthetic construct
  source 1..20: mol_type = other RNA
gctaatttccactatgtccc

SEQ ID NO: 5900 - RNA, 20 nt, synthetic construct
  source 1..20: mol_type = other RNA
gctatgcctcccaaatcaga

SEQ ID NO: 5901 - RNA, 20 nt, synthetic construct
  source 1..20: mol_type = other RNA
gctggaggcactgccttgac

SEQ ID NO: 5902 - RNA, 20 nt, synthetic construct
  source 1..20: mol_type = other RNA
gctggggtaaccaatccagt

SEQ ID NO: 5903 - RNA, 20 nt, synthetic construct
  source 1..20: mol_type = other RNA
gctgtgcctctcccatcaga

SEQ ID NO: 5904 - RNA, 20 nt, synthetic construct
  source 1..20: mol_type = other RNA
gcttagttctgcctttgagt

SEQ ID NO: 5905 - RNA, 20 nt, synthetic construct
  source 1..20: mol_type = other RNA
gcttcacgcttccctagaga

SEQ ID NO: 5906 - RNA, 20 nt, synthetic construct
  source 1..20: mol_type = other RNA
gcttccctagagagggctgt

SEQ ID NO: 5907 - RNA, 20 nt, synthetic construct
  source 1..20: mol_type = other RNA
gcttctcccaccagactact

SEQ ID NO: 5908 - RNA, 20 nt, synthetic construct
  source 1..20: mol_type = other RNA
ggaaattagctggggtaacc

SEQ ID NO: 5909 - RNA, 20 nt, synthetic construct
  source 1..20: mol_type = other RNA
ggaagcgtgaagctggaggc

SEQ ID NO: 5910 - RNA, 20 nt, synthetic construct
  source 1..20: mol_type = other RNA
ggacatagtggaaattagct

SEQ ID NO: 5911 - RNA, 20 nt, synthetic construct
  source 1..20: mol_type = other RNA
ggagaagcttagttctgcct

SEQ ID NO: 5912 - RNA, 20 nt, synthetic construct
  source 1..20: mol_type = other RNA
ggagaggcacagccctctct

SEQ ID NO: 5913 - RNA, 20 nt, synthetic construct
  source 1..20: mol_type = other RNA
ggagagtctgatgggagagg

SEQ ID NO: 5914 - RNA, 20 nt, synthetic construct
  source 1..20: mol_type = other RNA
ggaggcactgccttgacttg

SEQ ID NO: 5915 - RNA, 20 nt, synthetic construct
  source 1..20: mol_type = other RNA
ggaggcaggccttttcctga

SEQ ID NO: 5916 - RNA, 20 nt, synthetic construct
  source 1..20: mol_type = other RNA
ggaggcatagcccggcccag

SEQ ID NO: 5917 - RNA, 20 nt, synthetic construct
  source 1..20: mol_type = other RNA
ggattggttaccccagctaa

SEQ ID NO: 5918 - RNA, 20 nt, synthetic construct
  source 1..20: mol_type = other RNA
ggcacagccctctctaggga

SEQ ID NO: 5919 - RNA, 20 nt, synthetic construct
  source 1..20: mol_type = other RNA
ggcactgccttgacttgcac

SEQ ID NO: 5920 - RNA, 20 nt, synthetic construct
  source 1..20: mol_type = other RNA
ggcagaactaagcttctccc

SEQ ID NO: 5921 - RNA, 20 nt, synthetic construct
  source 1..20: mol_type = other RNA
ggcaggccttttcctgagta

SEQ ID NO: 5922 - RNA, 20 nt, synthetic construct
  source 1..20: mol_type = other RNA
ggcagtgcctccagcttcac

SEQ ID NO: 5923 - RNA, 20 nt, synthetic construct
  source 1..20: mol_type = other RNA
ggcatagcccggcccaggag

SEQ ID NO: 5924 - RNA, 20 nt, synthetic construct
  source 1..20: mol_type = other RNA
ggccaagggacatagtggaa

SEQ ID NO: 5925 - RNA, 20 nt, synthetic construct
  source 1..20: mol_type = other RNA
ggcccaggagagtctgatgg

SEQ ID NO: 5926 - RNA, 20 nt, synthetic construct
  source 1..20: mol_type = other RNA
ggccgggctatgcctcccaa

SEQ ID NO: 5927 - RNA, 20 nt, synthetic construct
  source 1..20: mol_type = other RNA
ggccttttcctgagtagtct

SEQ ID NO: 5928 - RNA, 20 nt, synthetic construct
  source 1..20: mol_type = other RNA
ggctatgcctcccaaatcag

SEQ ID NO: 5929 - RNA, 20 nt, synthetic construct
  source 1..20: mol_type = other RNA
ggctgtgcctctcccatcag

SEQ ID NO: 5930 - RNA, 20 nt, synthetic construct
  source 1..20: mol_type = other RNA
gggaagcgtgaagctggagg

SEQ ID NO: 5931 - RNA, 20 nt, synthetic construct
  source 1..20: mol_type = other RNA
gggacatagtggaaattagc

SEQ ID NO: 5932 - RNA, 20 nt, synthetic construct
  source 1..20: mol_type = other RNA
gggagaagcttagttctgcc

SEQ ID NO: 5933 - RNA, 20 nt, synthetic construct
  source 1..20: mol_type = other RNA
gggagaggcacagccctctc

SEQ ID NO: 5934 - RNA, 20 nt, synthetic construct
  source 1..20: mol_type = other RNA
gggaggcaggccttttcctg

SEQ ID NO: 5935 - RNA, 20 nt, synthetic construct
  source 1..20: mol_type = other RNA
gggaggcatagcccggccca

SEQ ID NO: 5936 - RNA, 20 nt, synthetic construct
  source 1..20: mol_type = other RNA
gggccaagggacatagtgga

SEQ ID NO: 5937 - RNA, 20 nt, synthetic construct
  source 1..20: mol_type = other RNA
gggccgggctatgcctccca

SEQ ID NO: 5938 - RNA, 20 nt, synthetic construct
  source 1..20: mol_type = other RNA
gggctatgcctcccaaatca

SEQ ID NO: 5939 - RNA, 20 nt, synthetic construct
  source 1..20: mol_type = other RNA
gggctgtgcctctcccatca

SEQ ID NO: 5940 - RNA, 20 nt, synthetic construct
  source 1..20: mol_type = other RNA
ggggaggcaggccttttcct

SEQ ID NO: 5941 - RNA, 20 nt, synthetic construct
  source 1..20: mol_type = other RNA
ggggccaagggacatagtgg

SEQ ID NO: 5942 - RNA, 20 nt, synthetic construct
  source 1..20: mol_type = other RNA
gggggaggcaggccttttcc

SEQ ID NO: 5943 - RNA, 20 nt, synthetic construct
  source 1..20: mol_type = other RNA
gggggccaagggacatagtg

SEQ ID NO: 5944 - RNA, 20 nt, synthetic construct
  source 1..20: mol_type = other RNA
ggggggaggcaggccttttc

SEQ ID NO: 5945 - RNA, 20 nt, synthetic construct
  source 1..20: mol_type = other RNA
ggggtaaccaatccagtgca

SEQ ID NO: 5946 - RNA, 20 nt, synthetic construct
  source 1..20: mol_type = other RNA
gggtaaccaatccagtgcaa

SEQ ID NO: 5947 - RNA, 20 nt, synthetic construct
  source 1..20: mol_type = other RNA
ggtaaccaatccagtgcaag

SEQ ID NO: 5948 - RNA, 20 nt, synthetic construct
  source 1..20: mol_type = other RNA
ggtgggagaagcttagttct

SEQ ID NO: 5949 - RNA, 20 nt, synthetic construct
  source 1..20: mol_type = other RNA
ggttaccccagctaatttcc

SEQ ID NO: 5950 - RNA, 20 nt, synthetic construct
  source 1..20: mol_type = other RNA
gtaaccaatccagtgcaagt

SEQ ID NO: 5951 - RNA, 20 nt, synthetic construct
  source 1..20: mol_type = other RNA
gtagtctggtgggagaagct

SEQ ID NO: 5952 - RNA, 20 nt, synthetic construct
  source 1..20: mol_type = other RNA
gtcaaggcagtgcctccagc

SEQ ID NO: 5953 - RNA, 20 nt, synthetic construct
  source 1..20: mol_type = other RNA
gtctgatgggagaggcacag

SEQ ID NO: 5954 - RNA, 20 nt, synthetic construct
  source 1..20: mol_type = other RNA
gtctgatttgggaggcatag

SEQ ID NO: 5955 - RNA, 20 nt, synthetic construct
  source 1..20: mol_type = other RNA
gtctggtgggagaagcttag

SEQ ID NO: 5956 - RNA, 20 nt, synthetic construct
  source 1..20: mol_type = other RNA
gtgaagctggaggcactgcc

SEQ ID NO: 5957 - RNA, 20 nt, synthetic construct
  source 1..20: mol_type = other RNA
gtgcaagtcaaggcagtgcc

SEQ ID NO: 5958 - RNA, 20 nt, synthetic construct
  source 1..20: mol_type = other RNA
gtgcagagggggccaaggga

SEQ ID NO: 5959 - RNA, 20 nt, synthetic construct
  source 1..20: mol_type = other RNA
gtgcctccagcttcacgctt

SEQ ID NO: 5960 - RNA, 20 nt, synthetic construct
  source 1..20: mol_type = other RNA
gtgcctctcccatcagactc

SEQ ID NO: 5961 - RNA, 20 nt, synthetic construct
  source 1..20: mol_type = other RNA
gtggaaattagctggggtaa

SEQ ID NO: 5962 - RNA, 20 nt, synthetic construct
  source 1..20: mol_type = other RNA
gtgggagaagcttagttctg

SEQ ID NO: 5963 - RNA, 20 nt, synthetic construct
  source 1..20: mol_type = other RNA
gttaccccagctaatttcca

SEQ ID NO: 5964 - RNA, 20 nt, synthetic construct
  source 1..20: mol_type = other RNA
gttctgcctttgagtctgat

SEQ ID NO: 5965 - RNA, 20 nt, synthetic construct
  source 1..20: mol_type = other RNA
taaccaatccagtgcaagtc

SEQ ID NO: 5966 - RNA, 20 nt, synthetic construct
  source 1..20: mol_type = other RNA
taagcttctcccaccagact

SEQ ID NO: 5967 - RNA, 20 nt, synthetic construct
  source 1..20: mol_type = other RNA
taatttccactatgtccctt

SEQ ID NO: 5968 - RNA, 20 nt, synthetic construct
  source 1..20: mol_type = other RNA
taccccagctaatttccact

SEQ ID NO: 5969 - RNA, 20 nt, synthetic construct
  source 1..20: mol_type = other RNA
tactcaggaaaaggcctgcc

SEQ ID NO: 5970 - RNA, 20 nt, synthetic construct
  source 1..20: mol_type = other RNA
tagagagggctgtgcctctc

SEQ ID NO: 5971 - RNA, 20 nt, synthetic construct
  source 1..20: mol_type = other RNA
tagcccggcccaggagagtc

SEQ ID NO: 5972 - RNA, 20 nt, synthetic construct
  source 1..20: mol_type = other RNA
tagctggggtaaccaatcca

SEQ ID NO: 5973 - RNA, 20 nt, synthetic construct
  source 1..20: mol_type = other RNA
tagggaagcgtgaagctgga

SEQ ID NO: 5974 - RNA, 20 nt, synthetic construct
  source 1..20: mol_type = other RNA
tagtctggtgggagaagctt

SEQ ID NO: 5975 - RNA, 20 nt, synthetic construct
  source 1..20: mol_type = other RNA
tagtggaaattagctggggt

SEQ ID NO: 5976 - RNA, 20 nt, synthetic construct
  source 1..20: mol_type = other RNA
tagttctgcctttgagtctg

SEQ ID NO: 5977 - RNA, 20 nt, synthetic construct
  source 1..20: mol_type = other RNA
tatgcctcccaaatcagact

SEQ ID NO: 5978 - RNA, 20 nt, synthetic construct
  source 1..20: mol_type = other RNA
tatgtcccttggccccctct

SEQ ID NO: 5979 - RNA, 20 nt, synthetic construct
  source 1..20: mol_type = other RNA
tcaaaggcagaactaagctt

SEQ ID NO: 5980 - RNA, 20 nt, synthetic construct
  source 1..20: mol_type = other RNA
tcaaggcagtgcctccagct

SEQ ID NO: 5981 - RNA, 20 nt, synthetic construct
  source 1..20: mol_type = other RNA
tcacgcttccctagagaggg

SEQ ID NO: 5982 - RNA, 20 nt, synthetic construct
  source 1..20: mol_type = other RNA
tcagactcaaaggcagaact

SEQ ID NO: 5983 - RNA, 20 nt, synthetic construct
  source 1..20: mol_type = other RNA
tcagactctcctgggccggg

SEQ ID NO: 5984 - RNA, 20 nt, synthetic construct
  source 1..20: mol_type = other RNA
tcaggaaaaggcctgcctcc

SEQ ID NO: 5985 - RNA, 20 nt, synthetic construct
  source 1..20: mol_type = other RNA
tccactatgtcccttggccc

SEQ ID NO: 5986 - RNA, 20 nt, synthetic construct
  source 1..20: mol_type = other RNA
tccagcttcacgcttcccta

SEQ ID NO: 5987 - RNA, 20 nt, synthetic construct
  source 1..20: mol_type = other RNA
tccagtgcaagtcaaggcag

SEQ ID NO: 5988 - RNA, 20 nt, synthetic construct
  source 1..20: mol_type = other RNA
tcccaaatcagactcaaagg

SEQ ID NO: 5989 - RNA, 20 nt, synthetic construct
  source 1..20: mol_type = other RNA
tcccaccagactactcagga

SEQ ID NO: 5990 - RNA, 20 nt, synthetic construct
  source 1..20: mol_type = other RNA
tcccatcagactctcctggg

SEQ ID NO: 5991 - RNA, 20 nt, synthetic construct
  source 1..20: mol_type = other RNA
tccctagagagggctgtgcc

SEQ ID NO: 5992 - RNA, 20 nt, synthetic construct
  source 1..20: mol_type = other RNA
tcctgagtagtctggtggga

SEQ ID NO: 5993 - RNA, 20 nt, synthetic construct
  source 1..20: mol_type = other RNA
tcctgggccgggctatgcct

SEQ ID NO: 5994 - RNA, 20 nt, synthetic construct
  source 1..20: mol_type = other RNA
tctagggaagcgtgaagctg

SEQ ID NO: 5995 - RNA, 20 nt, synthetic construct
  source 1..20: mol_type = other RNA
tctcccaccagactactcag

SEQ ID NO: 5996 - RNA, 20 nt, synthetic construct
  source 1..20: mol_type = other RNA
tctcccatcagactctcctg

SEQ ID NO: 5997 - RNA, 20 nt, synthetic construct
  source 1..20: mol_type = other RNA
tctcctgggccgggctatgc

SEQ ID NO: 5998 - RNA, 20 nt, synthetic construct
  source 1..20: mol_type = other RNA
tctctagggaagcgtgaagc

SEQ ID NO: 5999 - RNA, 20 nt, synthetic construct
  source 1..20: mol_type = other RNA
tctgaggggggaggcaggcc

SEQ ID NO: 6000 - RNA, 20 nt, synthetic construct
  source 1..20: mol_type = other RNA
tctgatgggagaggcacagc

SEQ ID NO: 6001 - RNA, 20 nt, synthetic construct
  source 1..20: mol_type = other RNA
tctgatttgggaggcatagc

SEQ ID NO: 6002 - RNA, 20 nt, synthetic construct
  source 1..20: mol_type = other RNA
tctgcctttgagtctgattt

SEQ ID NO: 6003 - RNA, 20 nt, synthetic construct
  source 1..20: mol_type = other RNA
tctggtgggagaagcttagt

SEQ ID NO: 6004 - RNA, 20 nt, synthetic construct
  source 1..20: mol_type = other RNA
tgaagctggaggcactgcct

SEQ ID NO: 6005 - RNA, 20 nt, synthetic construct
  source 1..20: mol_type = other RNA
tgacttgcactggattggtt

SEQ ID NO: 6006 - RNA, 20 nt, synthetic construct
  source 1..20: mol_type = other RNA
tgaggggggaggcaggcctt

SEQ ID NO: 6007 - RNA, 20 nt, synthetic construct
  source 1..20: mol_type = other RNA
tgagtagtctggtgggagaa

SEQ ID NO: 6008 - RNA, 20 nt, synthetic construct
  source 1..20: mol_type = other RNA
tgagtctgatttgggaggca

SEQ ID NO: 6009 - RNA, 20 nt, synthetic construct
  source 1..20: mol_type = other RNA
tgatgggagaggcacagccc

SEQ ID NO: 6010 - RNA, 20 nt, synthetic construct
  source 1..20: mol_type = other RNA
tgatttgggaggcatagccc

SEQ ID NO: 6011 - RNA, 20 nt, synthetic construct
  source 1..20: mol_type = other RNA
tgcaagtcaaggcagtgcct

SEQ ID NO: 6012 - RNA, 20 nt, synthetic construct
  source 1..20: mol_type = other RNA
tgcactggattggttacccc

SEQ ID NO: 6013 - RNA, 20 nt, synthetic construct
  source 1..20: mol_type = other RNA
tgcagagggggccaagggac

SEQ ID NO: 6014 - RNA, 20 nt, synthetic construct
  source 1..20: mol_type = other RNA
tgcctccagcttcacgcttc

SEQ ID NO: 6015 - RNA, 20 nt, synthetic construct
  source 1..20: mol_type = other RNA
tgcctcccaaatcagactca

SEQ ID NO: 6016 - RNA, 20 nt, synthetic construct
  source 1..20: mol_type = other RNA
tgcctctcccatcagactct

SEQ ID NO: 6017 - RNA, 20 nt, synthetic construct
  source 1..20: mol_type = other RNA
tgccttgacttgcactggat

SEQ ID NO: 6018 - RNA, 20 nt, synthetic construct
  source 1..20: mol_type = other RNA
tgcctttgagtctgatttgg

SEQ ID NO: 6019 - RNA, 20 nt, synthetic construct
  source 1..20: mol_type = other RNA
tggaaattagctggggtaac

SEQ ID NO: 6020 - RNA, 20 nt, synthetic construct
  source 1..20: mol_type = other RNA
tggaggcactgccttgactt

SEQ ID NO: 6021 - RNA, 20 nt, synthetic construct
  source 1..20: mol_type = other RNA
tggattggttaccccagcta

SEQ ID NO: 6022 - RNA, 20 nt, synthetic construct
  source 1..20: mol_type = other RNA
tgggagaagcttagttctgc

SEQ ID NO: 6023 - RNA, 20 nt, synthetic construct
  source 1..20: mol_type = other RNA
tgggagaggcacagccctct

SEQ ID NO: 6024 - RNA, 20 nt, synthetic construct
  source 1..20: mol_type = other RNA
tgggaggcatagcccggccc

SEQ ID NO: 6025 - RNA, 20 nt, synthetic construct
  source 1..20: mol_type = other RNA
tgggccgggctatgcctccc

SEQ ID NO: 6026 - RNA, 20 nt, synthetic construct
  source 1..20: mol_type = other RNA
tggggtaaccaatccagtgc

SEQ ID NO: 6027 - RNA, 20 nt, synthetic construct
  source 1..20: mol_type = other RNA
tggtgggagaagcttagttc

SEQ ID NO: 6028 - RNA, 20 nt, synthetic construct
  source 1..20: mol_type = other RNA
tggttaccccagctaatttc

SEQ ID NO: 6029 - RNA, 20 nt, synthetic construct
  source 1..20: mol_type = other RNA
tgtgcctctcccatcagact

SEQ ID NO: 6030 - RNA, 20 nt, synthetic construct
  source 1..20: mol_type = other RNA
ttaccccagctaatttccac

SEQ ID NO: 6031 - RNA, 20 nt, synthetic construct
  source 1..20: mol_type = other RNA
ttagctggggtaaccaatcc

SEQ ID NO: 6032 - RNA, 20 nt, synthetic construct
  source 1..20: mol_type = other RNA
ttagttctgcctttgagtct

SEQ ID NO: 6033 - RNA, 20 nt, synthetic construct
  source 1..20: mol_type = other RNA
ttcacgcttccctagagagg

SEQ ID NO: 6034 - RNA, 20 nt, synthetic construct
  source 1..20: mol_type = other RNA
ttccactatgtcccttggcc

SEQ ID NO: 6035 - RNA, 20 nt, synthetic construct
  source 1..20: mol_type = other RNA
ttccctagagagggctgtgc

SEQ ID NO: 6036 - RNA, 20 nt, synthetic construct
  source 1..20: mol_type = other RNA
ttcctgagtagtctggtggg

SEQ ID NO: 6037 - RNA, 20 nt, synthetic construct
  source 1..20: mol_type = other RNA
ttctcccaccagactactca

SEQ ID NO: 6038 - RNA, 20 nt, synthetic construct
  source 1..20: mol_type = other RNA
ttctgcctttgagtctgatt

SEQ ID NO: 6039 - RNA, 20 nt, synthetic construct
  source 1..20: mol_type = other RNA
ttgacttgcactggattggt

SEQ ID NO: 6040 - RNA, 20 nt, synthetic construct
  source 1..20: mol_type = other RNA
ttgagtctgatttgggaggc

SEQ ID NO: 6041 - RNA, 20 nt, synthetic construct
  source 1..20: mol_type = other RNA
ttgcactggattggttaccc

SEQ ID NO: 6042 - RNA, 20 nt, synthetic construct
  source 1..20: mol_type = other RNA
ttgggaggcatagcccggcc

SEQ ID NO: 6043 - RNA, 20 nt, synthetic construct
  source 1..20: mol_type = other RNA
ttggttaccccagctaattt

SEQ ID NO: 6044 - RNA, 20 nt, synthetic construct
  source 1..20: mol_type = other RNA
tttccactatgtcccttggc

SEQ ID NO: 6045 - RNA, 20 nt, synthetic construct
  source 1..20: mol_type = other RNA
tttcctgagtagtctggtgg

SEQ ID NO: 6046 - RNA, 20 nt, synthetic construct
  source 1..20: mol_type = other RNA
tttgagtctgatttgggagg

SEQ ID NO: 6047 - RNA, 20 nt, synthetic construct
  source 1..20: mol_type = other RNA
tttgggaggcatagcccggc

SEQ ID NO: 6048 - RNA, 20 nt, synthetic construct
  source 1..20: mol_type = other RNA
ttttcctgagtagtctggtg

SEQ ID NO: 6049 - RNA, 21 nt, synthetic construct
  source 1..21: mol_type = other RNA
aaaggcagaactaagcttctc

SEQ ID NO: 6050 - RNA, 21 nt, synthetic construct
  source 1..21: mol_type = other RNA
aaatcagactcaaaggcagaa

SEQ ID NO: 6051 - RNA, 21 nt, synthetic construct
  source 1..21: mol_type = other RNA
aaattagctggggtaaccaat

SEQ ID NO: 6052 - RNA, 21 nt, synthetic construct
  source 1..21: mol_type = other RNA
aaccaatccagtgcaagtcaa

SEQ ID NO: 6053 - RNA, 21 nt, synthetic construct
  source 1..21: mol_type = other RNA
aactaagcttctcccaccaga

SEQ ID NO: 6054 - RNA, 21 nt, synthetic construct
  source 1..21: mol_type = other RNA
aagcgtgaagctggaggcact

SEQ ID NO: 6055 - RNA, 21 nt, synthetic construct
  source 1..21: mol_type = other RNA
aagctggaggcactgccttga

SEQ ID NO: 6056 - RNA, 21 nt, synthetic construct
  source 1..21: mol_type = other RNA
aagcttagttctgcctttgag

SEQ ID NO: 6057 - RNA, 21 nt, synthetic construct
  source 1..21: mol_type = other RNA
aagcttctcccaccagactac

SEQ ID NO: 6058 - RNA, 21 nt, synthetic construct
  source 1..21: mol_type = other RNA
aaggcagaactaagcttctcc

SEQ ID NO: 6059 - RNA, 21 nt, synthetic construct
  source 1..21: mol_type = other RNA
aaggcagtgcctccagcttca

SEQ ID NO: 6060 - RNA, 21 nt, synthetic construct
  source 1..21: mol_type = other RNA
aagggacatagtggaaattag

SEQ ID NO: 6061 - RNA, 21 nt, synthetic construct
  source 1..21: mol_type = other RNA
aagtcaaggcagtgcctccag

SEQ ID NO: 6062 - RNA, 21 nt, synthetic construct
  source 1..21: mol_type = other RNA
aagtgcagagggggccaaggg

SEQ ID NO: 6063 - RNA, 21 nt, synthetic construct
  source 1..21: mol_type = other RNA
aatcagactcaaaggcagaac

SEQ ID NO: 6064 - RNA, 21 nt, synthetic construct
  source 1..21: mol_type = other RNA
aatccagtgcaagtcaaggca

SEQ ID NO: 6065 - RNA, 21 nt, synthetic construct
  source 1..21: mol_type = other RNA
aattagctggggtaaccaatc

SEQ ID NO: 6066 - RNA, 21 nt, synthetic construct
  source 1..21: mol_type = other RNA
aatttccactatgtcccttgg

SEQ ID NO: 6067 - RNA, 21 nt, synthetic construct
  source 1..21: mol_type = other RNA
acagccctctctagggaagcg

SEQ ID NO: 6068 - RNA, 21 nt, synthetic construct
  source 1..21: mol_type = other RNA
acatagtggaaattagctggg

SEQ ID NO: 6069 - RNA, 21 nt, synthetic construct
  source 1..21: mol_type = other RNA
accaatccagtgcaagtcaag

SEQ ID NO: 6070 - RNA, 21 nt, synthetic construct
  source 1..21: mol_type = other RNA
accagactactcaggaaaagg

SEQ ID NO: 6071 - RNA, 21 nt, synthetic construct
  source 1..21: mol_type = other RNA
accccagctaatttccactat

SEQ ID NO: 6072 - RNA, 21 nt, synthetic construct
  source 1..21: mol_type = other RNA
acgcttccctagagagggctg

SEQ ID NO: 6073 - RNA, 21 nt, synthetic construct
  source 1..21: mol_type = other RNA
actaagcttctcccaccagac

SEQ ID NO: 6074 - RNA, 21 nt, synthetic construct
  source 1..21: mol_type = other RNA
actactcaggaaaaggcctgc

SEQ ID NO: 6075 - RNA, 21 nt, synthetic construct
  source 1..21: mol_type = other RNA
actatgtcccttggccccctc

SEQ ID NO: 6076 - RNA, 21 nt, synthetic construct
  source 1..21: mol_type = other RNA
actcaaaggcagaactaagct

SEQ ID NO: 6077 - RNA, 21 nt, synthetic construct
  source 1..21: mol_type = other RNA
actcaggaaaaggcctgcctc

SEQ ID NO: 6078 - RNA, 21 nt, synthetic construct
  source 1..21: mol_type = other RNA
actctcctgggccgggctatg

SEQ ID NO: 6079 - RNA, 21 nt, synthetic construct
  source 1..21: mol_type = other RNA
actgccttgacttgcactgga

SEQ ID NO: 6080 - RNA, 21 nt, synthetic construct
  source 1..21: mol_type = other RNA
actggattggttaccccagct

SEQ ID NO: 6081 - RNA, 21 nt, synthetic construct
  source 1..21: mol_type = other RNA
acttgcactggattggttacc

SEQ ID NO: 6082 - RNA, 21 nt, synthetic construct
  source 1..21: mol_type = other RNA
agaactaagcttctcccacca

SEQ ID NO: 6083 - RNA, 21 nt, synthetic construct
  source 1..21: mol_type = other RNA
agaagcttagttctgcctttg

SEQ ID NO: 6084 - RNA, 21 nt, synthetic construct
  source 1..21: mol_type = other RNA
agactactcaggaaaaggcct

SEQ ID NO: 6085 - RNA, 21 nt, synthetic construct
  source 1..21: mol_type = other RNA
agactcaaaggcagaactaag

SEQ ID NO: 6086 - RNA, 21 nt, synthetic construct
  source 1..21: mol_type = other RNA
agactctcctgggccgggcta

SEQ ID NO: 6087 - RNA, 21 nt, synthetic construct
  source 1..21: mol_type = other RNA
agagagggctgtgcctctccc

SEQ ID NO: 6088 - RNA, 21 nt, synthetic construct
  source 1..21: mol_type = other RNA
agaggcacagccctctctagg

SEQ ID NO: 6089 - RNA, 21 nt, synthetic construct
  source 1..21: mol_type = other RNA
agagggctgtgcctctcccat

SEQ ID NO: 6090 - RNA, 21 nt, synthetic construct
  source 1..21: mol_type = other RNA
agagggggccaagggacatag

SEQ ID NO: 6091 - RNA, 21 nt, synthetic construct
  source 1..21: mol_type = other RNA
agagtctgatgggagaggcac

SEQ ID NO: 6092 - RNA, 21 nt, synthetic construct
  source 1..21: mol_type = other RNA
agcccggcccaggagagtctg

SEQ ID NO: 6093 - RNA, 21 nt, synthetic construct
  source 1..21: mol_type = other RNA
agccctctctagggaagcgtg

SEQ ID NO: 6094 - RNA, 21 nt, synthetic construct
  source 1..21: mol_type = other RNA
agcgtgaagctggaggcactg

SEQ ID NO: 6095 - RNA, 21 nt, synthetic construct
  source 1..21: mol_type = other RNA
agctaatttccactatgtccc

SEQ ID NO: 6096 - RNA, 21 nt, synthetic construct
  source 1..21: mol_type = other RNA
agctggaggcactgccttgac

SEQ ID NO: 6097 - RNA, 21 nt, synthetic construct
  source 1..21: mol_type = other RNA
agctggggtaaccaatccagt

SEQ ID NO: 6098 - RNA, 21 nt, synthetic construct
  source 1..21: mol_type = other RNA
agcttagttctgcctttgagt

SEQ ID NO: 6099 - RNA, 21 nt, synthetic construct
  source 1..21: mol_type = other RNA
agcttcacgcttccctagaga

SEQ ID NO: 6100 - RNA, 21 nt, synthetic construct
  source 1..21: mol_type = other RNA
agcttctcccaccagactact

SEQ ID NO: 6101 - RNA, 21 nt, synthetic construct
  source 1..21: mol_type = other RNA
aggagagtctgatgggagagg

SEQ ID NO: 6102 - RNA, 21 nt, synthetic construct
  source 1..21: mol_type = other RNA
aggcacagccctctctaggga

SEQ ID NO: 6103 - RNA, 21 nt, synthetic construct
  source 1..21: mol_type = other RNA
aggcactgccttgacttgcac

SEQ ID NO: 6104 - RNA, 21 nt, synthetic construct
  source 1..21: mol_type = other RNA
aggcagaactaagcttctccc

SEQ ID NO: 6105 - RNA, 21 nt, synthetic construct
  source 1..21: mol_type = other RNA
aggcaggccttttcctgagta

SEQ ID NO: 6106 - RNA, 21 nt, synthetic construct
  source 1..21: mol_type = other RNA
aggcagtgcctccagcttcac

SEQ ID NO: 6107 - RNA, 21 nt, synthetic construct
  source 1..21: mol_type = other RNA
aggcatagcccggcccaggag

SEQ ID NO: 6108 - RNA, 21 nt, synthetic construct
  source 1..21: mol_type = other RNA
aggccttttcctgagtagtct

SEQ ID NO: 6109 - RNA, 21 nt, synthetic construct
  source 1..21: mol_type = other RNA
agggaagcgtgaagctggagg

SEQ ID NO: 6110 - RNA, 21 nt, synthetic construct
  source 1..21: mol_type = other RNA
agggacatagtggaaattagc

SEQ ID NO: 6111 - RNA, 21 nt, synthetic construct
  source 1..21: mol_type = other RNA
agggctgtgcctctcccatca

SEQ ID NO: 6112 - RNA, 21 nt, synthetic construct
  source 1..21: mol_type = other RNA
agggggccaagggacatagtg

SEQ ID NO: 6113 - RNA, 21 nt, synthetic construct
  source 1..21: mol_type = other RNA
aggggggaggcaggccttttc

SEQ ID NO: 6114 - RNA, 21 nt, synthetic construct
  source 1..21: mol_type = other RNA
agtagtctggtgggagaagct

SEQ ID NO: 6115 - RNA, 21 nt, synthetic construct
  source 1..21: mol_type = other RNA
agtcaaggcagtgcctccagc

SEQ ID NO: 6116 - RNA, 21 nt, synthetic construct
  source 1..21: mol_type = other RNA
agtctgatgggagaggcacag

SEQ ID NO: 6117 - RNA, 21 nt, synthetic construct
  source 1..21: mol_type = other RNA
agtctgatttgggaggcatag

SEQ ID NO: 6118 - RNA, 21 nt, synthetic construct
  source 1..21: mol_type = other RNA
agtctggtgggagaagcttag

SEQ ID NO: 6119 - RNA, 21 nt, synthetic construct
  source 1..21: mol_type = other RNA
agtgcaagtcaaggcagtgcc

SEQ ID NO: 6120 - RNA, 21 nt, synthetic construct
  source 1..21: mol_type = other RNA
agtgcagagggggccaaggga

SEQ ID NO: 6121 - RNA, 21 nt, synthetic construct
  source 1..21: mol_type = other RNA
agtgcctccagcttcacgctt

SEQ ID NO: 6122 - RNA, 21 nt, synthetic construct
  source 1..21: mol_type = other RNA
agtggaaattagctggggtaa

SEQ ID NO: 6123 - RNA, 21 nt, synthetic construct
  source 1..21: mol_type = other RNA
agttctgcctttgagtctgat

SEQ ID NO: 6124 - RNA, 21 nt, synthetic construct
  source 1..21: mol_type = other RNA
atagcccggcccaggagagtc

SEQ ID NO: 6125 - RNA, 21 nt, synthetic construct
  source 1..21: mol_type = other RNA
atagtggaaattagctggggt

SEQ ID NO: 6126 - RNA, 21 nt, synthetic construct
  source 1..21: mol_type = other RNA
atcagactcaaaggcagaact

SEQ ID NO: 6127 - RNA, 21 nt, synthetic construct
  source 1..21: mol_type = other RNA
atcagactctcctgggccggg

SEQ ID NO: 6128 - RNA, 21 nt, synthetic construct
  source 1..21: mol_type = other RNA
atccagtgcaagtcaaggcag

SEQ ID NO: 6129 - RNA, 21 nt, synthetic construct
  source 1..21: mol_type = other RNA
atgcctcccaaatcagactca

SEQ ID NO: 6130 - RNA, 21 nt, synthetic construct
  source 1..21: mol_type = other RNA
atgggagaggcacagccctct

SEQ ID NO: 6131 - RNA, 21 nt, synthetic construct
  source 1..21: mol_type = other RNA
attagctggggtaaccaatcc

SEQ ID NO: 6132 - RNA, 21 nt, synthetic construct
  source 1..21: mol_type = other RNA
attggttaccccagctaattt

SEQ ID NO: 6133 - RNA, 21 nt, synthetic construct
  source 1..21: mol_type = other RNA
atttccactatgtcccttggc

SEQ ID NO: 6134 - RNA, 21 nt, synthetic construct
  source 1..21: mol_type = other RNA
atttgggaggcatagcccggc

SEQ ID NO: 6135 - RNA, 21 nt, synthetic construct
  source 1..21: mol_type = other RNA
caaaggcagaactaagcttct

SEQ ID NO: 6136 - RNA, 21 nt, synthetic construct
  source 1..21: mol_type = other RNA
caaatcagactcaaaggcaga

SEQ ID NO: 6137 - RNA, 21 nt, synthetic construct
  source 1..21: mol_type = other RNA
caaggcagtgcctccagcttc

SEQ ID NO: 6138 - RNA, 21 nt, synthetic construct
  source 1..21: mol_type = other RNA
caagggacatagtggaaatta

SEQ ID NO: 6139 - RNA, 21 nt, synthetic construct
  source 1..21: mol_type = other RNA
caagtcaaggcagtgcctcca

SEQ ID NO: 6140 - RNA, 21 nt, synthetic construct
  source 1..21: mol_type = other RNA
caagtgcagagggggccaagg

SEQ ID NO: 6141 - RNA, 21 nt, synthetic construct
  source 1..21: mol_type = other RNA
caatccagtgcaagtcaaggc

SEQ ID NO: 6142 - RNA, 21 nt, synthetic construct
  source 1..21: mol_type = other RNA
cacagccctctctagggaagc

SEQ ID NO: 6143 - RNA, 21 nt, synthetic construct
  source 1..21: mol_type = other RNA
caccagactactcaggaaaag

SEQ ID NO: 6144 - RNA, 21 nt, synthetic construct
  source 1..21: mol_type = other RNA
cacgcttccctagagagggct

SEQ ID NO: 6145 - RNA, 21 nt, synthetic construct
  source 1..21: mol_type = other RNA
cactatgtcccttggccccct

SEQ ID NO: 6146 - RNA, 21 nt, synthetic construct
  source 1..21: mol_type = other RNA
cactgccttgacttgcactgg

SEQ ID NO: 6147 - RNA, 21 nt, synthetic construct
  source 1..21: mol_type = other RNA
cactggattggttaccccagc

SEQ ID NO: 6148 - RNA, 21 nt, synthetic construct
  source 1..21: mol_type = other RNA
cagaactaagcttctcccacc

SEQ ID NO: 6149 - RNA, 21 nt, synthetic construct
  source 1..21: mol_type = other RNA
cagactactcaggaaaaggcc

SEQ ID NO: 6150 - RNA, 21 nt, synthetic construct
  source 1..21: mol_type = other RNA
cagactcaaaggcagaactaa

SEQ ID NO: 6151 - RNA, 21 nt, synthetic construct
  source 1..21: mol_type = other RNA
cagactctcctgggccgggct

SEQ ID NO: 6152 - RNA, 21 nt, synthetic construct
  source 1..21: mol_type = other RNA
cagagggggccaagggacata

SEQ ID NO: 6153 - RNA, 21 nt, synthetic construct
  source 1..21: mol_type = other RNA
cagccctctctagggaagcgt

SEQ ID NO: 6154 - RNA, 21 nt, synthetic construct
  source 1..21: mol_type = other RNA
cagctaatttccactatgtcc

SEQ ID NO: 6155 - RNA, 21 nt, synthetic construct
  source 1..21: mol_type = other RNA
cagcttcacgcttccctagag

SEQ ID NO: 6156 - RNA, 21 nt, synthetic construct
  source 1..21: mol_type = other RNA
caggaaaaggcctgcctcccc

SEQ ID NO: 6157 - RNA, 21 nt, synthetic construct
  source 1..21: mol_type = other RNA
caggagagtctgatgggagag

SEQ ID NO: 6158 - RNA, 21 nt, synthetic construct
  source 1..21: mol_type = other RNA
caggccttttcctgagtagtc

SEQ ID NO: 6159 - RNA, 21 nt, synthetic construct
  source 1..21: mol_type = other RNA
cagtgcaagtcaaggcagtgc

SEQ ID NO: 6160 - RNA, 21 nt, synthetic construct
  source 1..21: mol_type = other RNA
cagtgcctccagcttcacgct

SEQ ID NO: 6161 - RNA, 21 nt, synthetic construct
  source 1..21: mol_type = other RNA
catagcccggcccaggagagt

SEQ ID NO: 6162 - RNA, 21 nt, synthetic construct
  source 1..21: mol_type = other RNA
catagtggaaattagctgggg

SEQ ID NO: 6163 - RNA, 21 nt, synthetic construct
  source 1..21: mol_type = other RNA
catcagactctcctgggccgg

SEQ ID NO: 6164 - RNA, 21 nt, synthetic construct
  source 1..21: mol_type = other RNA
ccaaatcagactcaaaggcag

SEQ ID NO: 6165 - RNA, 21 nt, synthetic construct
  source 1..21: mol_type = other RNA
ccaagggacatagtggaaatt

SEQ ID NO: 6166 - RNA, 21 nt, synthetic construct
  source 1..21: mol_type = other RNA
ccaatccagtgcaagtcaagg

SEQ ID NO: 6167 - RNA, 21 nt, synthetic construct
  source 1..21: mol_type = other RNA
ccaccagactactcaggaaaa

SEQ ID NO: 6168 - RNA, 21 nt, synthetic construct
  source 1..21: mol_type = other RNA
ccactatgtcccttggccccc

SEQ ID NO: 6169 - RNA, 21 nt, synthetic construct
  source 1..21: mol_type = other RNA
ccagactactcaggaaaaggc

SEQ ID NO: 6170 - RNA, 21 nt, synthetic construct
  source 1..21: mol_type = other RNA
ccagctaatttccactatgtc

SEQ ID NO: 6171 - RNA, 21 nt, synthetic construct
  source 1..21: mol_type = other RNA
ccagcttcacgcttccctaga

SEQ ID NO: 6172 - RNA, 21 nt, synthetic construct
  source 1..21: mol_type = other RNA
ccaggagagtctgatgggaga

SEQ ID NO: 6173 - RNA, 21 nt, synthetic construct
  source 1..21: mol_type = other RNA
ccagtgcaagtcaaggcagtg

SEQ ID NO: 6174 - RNA, 21 nt, synthetic construct
  source 1..21: mol_type = other RNA
ccatcagactctcctgggccg

SEQ ID NO: 6175 - RNA, 21 nt, synthetic construct
  source 1..21: mol_type = other RNA
cccaaatcagactcaaaggca

SEQ ID NO: 6176 - RNA, 21 nt, synthetic construct
  source 1..21: mol_type = other RNA
cccaccagactactcaggaaa

SEQ ID NO: 6177 - RNA, 21 nt, synthetic construct
  source 1..21: mol_type = other RNA
cccagctaatttccactatgt

SEQ ID NO: 6178 - RNA, 21 nt, synthetic construct
  source 1..21: mol_type = other RNA
cccaggagagtctgatgggag

SEQ ID NO: 6179 - RNA, 21 nt, synthetic construct
  source 1..21: mol_type = other RNA
cccatcagactctcctgggcc

SEQ ID NO: 6180 - RNA, 21 nt, synthetic construct
  source 1..21: mol_type = other RNA
ccccagctaatttccactatg

SEQ ID NO: 6181 - RNA, 21 nt, synthetic construct
  source 1..21: mol_type = other RNA
cccggcccaggagagtctgat

SEQ ID NO: 6182 - RNA, 21 nt, synthetic construct
  source 1..21: mol_type = other RNA
ccctagagagggctgtgcctc

SEQ ID NO: 6183 - RNA, 21 nt, synthetic construct
  source 1..21: mol_type = other RNA
ccctctctagggaagcgtgaa

SEQ ID NO: 6184 - RNA, 21 nt, synthetic construct
  source 1..21: mol_type = other RNA
ccggcccaggagagtctgatg

SEQ ID NO: 6185 - RNA, 21 nt, synthetic construct
  source 1..21: mol_type = other RNA
ccgggctatgcctcccaaatc

SEQ ID NO: 6186 - RNA, 21 nt, synthetic construct
  source 1..21: mol_type = other RNA
cctagagagggctgtgcctct

SEQ ID NO: 6187 - RNA, 21 nt, synthetic construct
  source 1..21: mol_type = other RNA
cctccagcttcacgcttccct

SEQ ID NO: 6188 - RNA, 21 nt, synthetic construct
  source 1..21: mol_type = other RNA
cctcccaaatcagactcaaag

SEQ ID NO: 6189 - RNA, 21 nt, synthetic construct
  source 1..21: mol_type = other RNA
cctctcccatcagactctcct

SEQ ID NO: 6190 - RNA, 21 nt, synthetic construct
  source 1..21: mol_type = other RNA
cctctctagggaagcgtgaag

SEQ ID NO: 6191 - RNA, 21 nt, synthetic construct
  source 1..21: mol_type = other RNA
cctgagtagtctggtgggaga

SEQ ID NO: 6192 - RNA, 21 nt, synthetic construct
  source 1..21: mol_type = other RNA
cctgggccgggctatgcctcc

SEQ ID NO: 6193 - RNA, 21 nt, synthetic construct
  source 1..21: mol_type = other RNA
ccttgacttgcactggattgg

SEQ ID NO: 6194 - RNA, 21 nt, synthetic construct
  source 1..21: mol_type = other RNA
cctttgagtctgatttgggag

SEQ ID NO: 6195 - RNA, 21 nt, synthetic construct
  source 1..21: mol_type = other RNA
ccttttcctgagtagtctggt

SEQ ID NO: 6196 - RNA, 21 nt, synthetic construct
  source 1..21: mol_type = other RNA
cgcttccctagagagggctgt

SEQ ID NO: 6197 - RNA, 21 nt, synthetic construct
  source 1..21: mol_type = other RNA
cggcccaggagagtctgatgg

SEQ ID NO: 6198 - RNA, 21 nt, synthetic construct
  source 1..21: mol_type = other RNA
cgggctatgcctcccaaatca

SEQ ID NO: 6199 - RNA, 21 nt, synthetic construct
  source 1..21: mol_type = other RNA
cgtgaagctggaggcactgcc

SEQ ID NO: 6200 - RNA, 21 nt, synthetic construct
  source 1..21: mol_type = other RNA
ctaagcttctcccaccagact

SEQ ID NO: 6201 - RNA, 21 nt, synthetic construct
  source 1..21: mol_type = other RNA
ctaatttccactatgtccctt

SEQ ID NO: 6202 - RNA, 21 nt, synthetic construct
  source 1..21: mol_type = other RNA
ctactcaggaaaaggcctgcc

SEQ ID NO: 6203 - RNA, 21 nt, synthetic construct
  source 1..21: mol_type = other RNA
ctagagagggctgtgcctctc

SEQ ID NO: 6204 - RNA, 21 nt, synthetic construct
  source 1..21: mol_type = other RNA
ctagggaagcgtgaagctgga

SEQ ID NO: 6205 - RNA, 21 nt, synthetic construct
  source 1..21: mol_type = other RNA
ctatgcctcccaaatcagact

SEQ ID NO: 6206 - RNA, 21 nt, synthetic construct
  source 1..21: mol_type = other RNA
ctatgtcccttggccccctct

SEQ ID NO: 6207 - RNA, 21 nt, synthetic construct
  source 1..21: mol_type = other RNA
ctcaaaggcagaactaagctt

SEQ ID NO: 6208 - RNA, 21 nt, synthetic construct
  source 1..21: mol_type = other RNA
ctcaggaaaaggcctgcctcc

SEQ ID NO: 6209 - RNA, 21 nt, synthetic construct
  source 1..21: mol_type = other RNA
ctccagcttcacgcttcccta

SEQ ID NO: 6210 - RNA, 21 nt, synthetic construct
  source 1..21: mol_type = other RNA
ctcccaaatcagactcaaagg

SEQ ID NO: 6211 - RNA, 21 nt, synthetic construct
  source 1..21: mol_type = other RNA
ctcccaccagactactcagga

SEQ ID NO: 6212 - RNA, 21 nt, synthetic construct
  source 1..21: mol_type = other RNA
ctcccatcagactctcctggg

SEQ ID NO: 6213 - RNA, 21 nt, synthetic construct
  source 1..21: mol_type = other RNA
ctcctgggccgggctatgcct

SEQ ID NO: 6214 - RNA, 21 nt, synthetic construct
  source 1..21: mol_type = other RNA
ctctagggaagcgtgaagctg

SEQ ID NO: 6215 - RNA, 21 nt, synthetic construct
  source 1..21: mol_type = other RNA
ctctcccatcagactctcctg

SEQ ID NO: 6216 - RNA, 21 nt, synthetic construct
  source 1..21: mol_type = other RNA
ctctcctgggccgggctatgc

SEQ ID NO: 6217 - RNA, 21 nt, synthetic construct
  source 1..21: mol_type = other RNA
ctctctagggaagcgtgaagc

SEQ ID NO: 6218 - RNA, 21 nt, synthetic construct
  source 1..21: mol_type = other RNA
ctgaggggggaggcaggcctt

SEQ ID NO: 6219 - RNA, 21 nt, synthetic construct
  source 1..21: mol_type = other RNA
ctgagtagtctggtgggagaa

SEQ ID NO: 6220 - RNA, 21 nt, synthetic construct
  source 1..21: mol_type = other RNA
ctgatgggagaggcacagccc

SEQ ID NO: 6221 - RNA, 21 nt, synthetic construct
  source 1..21: mol_type = other RNA
ctgatttgggaggcatagccc

SEQ ID NO: 6222 - RNA, 21 nt, synthetic construct
  source 1..21: mol_type = other RNA
ctgccttgacttgcactggat

SEQ ID NO: 6223 - RNA, 21 nt, synthetic construct
  source 1..21: mol_type = other RNA
ctgcctttgagtctgatttgg

SEQ ID NO: 6224 - RNA, 21 nt, synthetic construct
  source 1..21: mol_type = other RNA
ctggaggcactgccttgactt

SEQ ID NO: 6225 - RNA, 21 nt, synthetic construct
  source 1..21: mol_type = other RNA
ctggattggttaccccagcta

SEQ ID NO: 6226 - RNA, 21 nt, synthetic construct
  source 1..21: mol_type = other RNA
ctgggccgggctatgcctccc

SEQ ID NO: 6227 - RNA, 21 nt, synthetic construct
  source 1..21: mol_type = other RNA
ctggggtaaccaatccagtgc

SEQ ID NO: 6228 - RNA, 21 nt, synthetic construct
  source 1..21: mol_type = other RNA
ctggtgggagaagcttagttc

SEQ ID NO: 6229 - RNA, 21 nt, synthetic construct
  source 1..21: mol_type = other RNA
ctgtgcctctcccatcagact

SEQ ID NO: 6230 - RNA, 21 nt, synthetic construct
  source 1..21: mol_type = other RNA
cttagttctgcctttgagtct

SEQ ID NO: 6231 - RNA, 21 nt, synthetic construct
  source 1..21: mol_type = other RNA
cttcacgcttccctagagagg

SEQ ID NO: 6232 - RNA, 21 nt, synthetic construct
  source 1..21: mol_type = other RNA
cttccctagagagggctgtgc

SEQ ID NO: 6233 - RNA, 21 nt, synthetic construct
  source 1..21: mol_type = other RNA
cttctcccaccagactactca

SEQ ID NO: 6234 - RNA, 21 nt, synthetic construct
  source 1..21: mol_type = other RNA
cttgacttgcactggattggt

SEQ ID NO: 6235 - RNA, 21 nt, synthetic construct
  source 1..21: mol_type = other RNA
cttgcactggattggttaccc

SEQ ID NO: 6236 - RNA, 21 nt, synthetic construct
  source 1..21: mol_type = other RNA
ctttgagtctgatttgggagg

SEQ ID NO: 6237 - RNA, 21 nt, synthetic construct
  source 1..21: mol_type = other RNA
cttttcctgagtagtctggtg

SEQ ID NO: 6238 - RNA, 21 nt, synthetic construct
  source 1..21: mol_type = other RNA
gaaattagctggggtaaccaa

SEQ ID NO: 6239 - RNA, 21 nt, synthetic construct
  source 1..21: mol_type = other RNA
gaactaagcttctcccaccag

SEQ ID NO: 6240 - RNA, 21 nt, synthetic construct
  source 1..21: mol_type = other RNA
gaagcgtgaagctggaggcac

SEQ ID NO: 6241 - RNA, 21 nt, synthetic construct
  source 1..21: mol_type = other RNA
gaagctggaggcactgccttg

SEQ ID NO: 6242 - RNA, 21 nt, synthetic construct
  source 1..21: mol_type = other RNA
gaagcttagttctgcctttga

SEQ ID NO: 6243 - RNA, 21 nt, synthetic construct
  source 1..21: mol_type = other RNA
gacatagtggaaattagctgg

SEQ ID NO: 6244 - RNA, 21 nt, synthetic construct
  source 1..21: mol_type = other RNA
gactactcaggaaaaggcctg

SEQ ID NO: 6245 - RNA, 21 nt, synthetic construct
  source 1..21: mol_type = other RNA
gactcaaaggcagaactaagc

SEQ ID NO: 6246 - RNA, 21 nt, synthetic construct
  source 1..21: mol_type = other RNA
gactctcctgggccgggctat

SEQ ID NO: 6247 - RNA, 21 nt, synthetic construct
  source 1..21: mol_type = other RNA
gacttgcactggattggttac

SEQ ID NO: 6248 - RNA, 21 nt, synthetic construct
  source 1..21: mol_type = other RNA
gagaagcttagttctgccttt

SEQ ID NO: 6249 - RNA, 21 nt, synthetic construct
  source 1..21: mol_type = other RNA
gagaggcacagccctctctag

SEQ ID NO: 6250 - RNA, 21 nt, synthetic construct
  source 1..21: mol_type = other RNA
gagagggctgtgcctctccca

SEQ ID NO: 6251 - RNA, 21 nt, synthetic construct
  source 1..21: mol_type = other RNA
gagagtctgatgggagaggca

SEQ ID NO: 6252 - RNA, 21 nt, synthetic construct
  source 1..21: mol_type = other RNA
gaggcacagccctctctaggg

SEQ ID NO: 6253 - RNA, 21 nt, synthetic construct
  source 1..21: mol_type = other RNA
gaggcactgccttgacttgca

SEQ ID NO: 6254 - RNA, 21 nt, synthetic construct
  source 1..21: mol_type = other RNA
gaggcaggccttttcctgagt

SEQ ID NO: 6255 - RNA, 21 nt, synthetic construct
  source 1..21: mol_type = other RNA
gaggcatagcccggcccagga

SEQ ID NO: 6256 - RNA, 21 nt, synthetic construct
  source 1..21: mol_type = other RNA
gagggctgtgcctctcccatc

SEQ ID NO: 6257 - RNA, 21 nt, synthetic construct
  source 1..21: mol_type = other RNA
gagggggccaagggacatagt

SEQ ID NO: 6258 - RNA, 21 nt, synthetic construct
  source 1..21: mol_type = other RNA
gaggggggaggcaggcctttt

SEQ ID NO: 6259 - RNA, 21 nt, synthetic construct
  source 1..21: mol_type = other RNA
gagtagtctggtgggagaagc

SEQ ID NO: 6260 - RNA, 21 nt, synthetic construct
  source 1..21: mol_type = other RNA
gagtctgatgggagaggcaca

SEQ ID NO: 6261 - RNA, 21 nt, synthetic construct
  source 1..21: mol_type = other RNA
gagtctgatttgggaggcata

SEQ ID NO: 6262 - RNA, 21 nt, synthetic construct
  source 1..21: mol_type = other RNA
gatgggagaggcacagccctc

SEQ ID NO: 6263 - RNA, 21 nt, synthetic construct
  source 1..21: mol_type = other RNA
gattggttaccccagctaatt

SEQ ID NO: 6264 - RNA, 21 nt, synthetic construct
  source 1..21: mol_type = other RNA
gatttgggaggcatagcccgg

SEQ ID NO: 6265 - RNA, 21 nt, synthetic construct
  source 1..21: mol_type = other RNA
gcaagtcaaggcagtgcctcc

SEQ ID NO: 6266 - RNA, 21 nt, synthetic construct
  source 1..21: mol_type = other RNA
gcaagtgcagagggggccaag

SEQ ID NO: 6267 - RNA, 21 nt, synthetic construct
  source 1..21: mol_type = other RNA
gcacagccctctctagggaag

SEQ ID NO: 6268 - RNA, 21 nt, synthetic construct
  source 1..21: mol_type = other RNA
gcactgccttgacttgcactg

SEQ ID NO: 6269 - RNA, 21 nt, synthetic construct
  source 1..21: mol_type = other RNA
gcactggattggttaccccag

SEQ ID NO: 6270 - RNA, 21 nt, synthetic construct
  source 1..21: mol_type = other RNA
gcagaactaagcttctcccac

SEQ ID NO: 6271 - RNA, 21 nt, synthetic construct
  source 1..21: mol_type = other RNA
gcagagggggccaagggacat

SEQ ID NO: 6272 - RNA, 21 nt, synthetic construct
  source 1..21: mol_type = other RNA
gcaggccttttcctgagtagt

SEQ ID NO: 6273 - RNA, 21 nt, synthetic construct
  source 1..21: mol_type = other RNA
gcagtgcctccagcttcacgc

SEQ ID NO: 6274 - RNA, 21 nt, synthetic construct
  source 1..21: mol_type = other RNA
gcatagcccggcccaggagag

SEQ ID NO: 6275 - RNA, 21 nt, synthetic construct
  source 1..21: mol_type = other RNA
gccaagggacatagtggaaat

SEQ ID NO: 6276 - RNA, 21 nt, synthetic construct
  source 1..21: mol_type = other RNA
gcccaggagagtctgatggga

SEQ ID NO: 6277 - RNA, 21 nt, synthetic construct
  source 1..21: mol_type = other RNA
gcccggcccaggagagtctga

SEQ ID NO: 6278 - RNA, 21 nt, synthetic construct
  source 1..21: mol_type = other RNA
gccctctctagggaagcgtga

SEQ ID NO: 6279 - RNA, 21 nt, synthetic construct
  source 1..21: mol_type = other RNA
gccgggctatgcctcccaaat

SEQ ID NO: 6280 - RNA, 21 nt, synthetic construct
  source 1..21: mol_type = other RNA
gcctccagcttcacgcttccc

SEQ ID NO: 6281 - RNA, 21 nt, synthetic construct
  source 1..21: mol_type = other RNA
gcctcccaaatcagactcaaa

SEQ ID NO: 6282 - RNA, 21 nt, synthetic construct
  source 1..21: mol_type = other RNA
gcctctcccatcagactctcc

SEQ ID NO: 6283 - RNA, 21 nt, synthetic construct
  source 1..21: mol_type = other RNA
gccttgacttgcactggattg

SEQ ID NO: 6284 - RNA, 21 nt, synthetic construct
  source 1..21: mol_type = other RNA
gcctttgagtctgatttggga

SEQ ID NO: 6285 - RNA, 21 nt, synthetic construct
  source 1..21: mol_type = other RNA
gccttttcctgagtagtctgg

SEQ ID NO: 6286 - RNA, 21 nt, synthetic construct
  source 1..21: mol_type = other RNA
gcgtgaagctggaggcactgc

SEQ ID NO: 6287 - RNA, 21 nt, synthetic construct
  source 1..21: mol_type = other RNA
gctaatttccactatgtccct

SEQ ID NO: 6288 - RNA, 21 nt, synthetic construct
  source 1..21: mol_type = other RNA
gctatgcctcccaaatcagac

SEQ ID NO: 6289 - RNA, 21 nt, synthetic construct
  source 1..21: mol_type = other RNA
gctggaggcactgccttgact

SEQ ID NO: 6290 - RNA, 21 nt, synthetic construct
  source 1..21: mol_type = other RNA
gctggggtaaccaatccagtg

SEQ ID NO: 6291 - RNA, 21 nt, synthetic construct
  source 1..21: mol_type = other RNA
gctgtgcctctcccatcagac

SEQ ID NO: 6292 - RNA, 21 nt, synthetic construct
  source 1..21: mol_type = other RNA
gcttagttctgcctttgagtc

SEQ ID NO: 6293 - RNA, 21 nt, synthetic construct
  source 1..21: mol_type = other RNA
gcttcacgcttccctagagag

SEQ ID NO: 6294 - RNA, 21 nt, synthetic construct
  source 1..21: mol_type = other RNA
gcttccctagagagggctgtg

SEQ ID NO: 6295 - RNA, 21 nt, synthetic construct
  source 1..21: mol_type = other RNA
gcttctcccaccagactactc

SEQ ID NO: 6296 - RNA, 21 nt, synthetic construct
  source 1..21: mol_type = other RNA
ggaaattagctggggtaacca

SEQ ID NO: 6297 - RNA, 21 nt, synthetic construct
  source 1..21: mol_type = other RNA
ggaagcgtgaagctggaggca

SEQ ID NO: 6298 - RNA, 21 nt, synthetic construct
  source 1..21: mol_type = other RNA
ggacatagtggaaattagctg

SEQ ID NO: 6299 - RNA, 21 nt, synthetic construct
  source 1..21: mol_type = other RNA
ggagaagcttagttctgcctt

SEQ ID NO: 6300 - RNA, 21 nt, synthetic construct
  source 1..21: mol_type = other RNA
ggagaggcacagccctctcta

SEQ ID NO: 6301 - RNA, 21 nt, synthetic construct
  source 1..21: mol_type = other RNA
ggagagtctgatgggagaggc

SEQ ID NO: 6302 - RNA, 21 nt, synthetic construct
  source 1..21: mol_type = other RNA
ggaggcactgccttgacttgc

SEQ ID NO: 6303 - RNA, 21 nt, synthetic construct
  source 1..21: mol_type = other RNA
ggaggcaggccttttcctgag

SEQ ID NO: 6304 - RNA, 21 nt, synthetic construct
  source 1..21: mol_type = other RNA
ggaggcatagcccggcccagg

SEQ ID NO: 6305 - RNA, 21 nt, synthetic construct
  source 1..21: mol_type = other RNA
ggattggttaccccagctaat

SEQ ID NO: 6306 - RNA, 21 nt, synthetic construct
  source 1..21: mol_type = other RNA
ggcaagtgcagagggggccaa

SEQ ID NO: 6307 - RNA, 21 nt, synthetic construct
  source 1..21: mol_type = other RNA
ggcacagccctctctagggaa

SEQ ID NO: 6308 - RNA, 21 nt, synthetic construct
  source 1..21: mol_type = other RNA
ggcactgccttgacttgcact

SEQ ID NO: 6309 - RNA, 21 nt, synthetic construct
  source 1..21: mol_type = other RNA
ggcagaactaagcttctccca

SEQ ID NO: 6310 - RNA, 21 nt, synthetic construct
  source 1..21: mol_type = other RNA
ggcaggccttttcctgagtag

SEQ ID NO: 6311 - RNA, 21 nt, synthetic construct
  source 1..21: mol_type = other RNA
ggcagtgcctccagcttcacg

SEQ ID NO: 6312 - RNA, 21 nt, synthetic construct
  source 1..21: mol_type = other RNA
ggcatagcccggcccaggaga

SEQ ID NO: 6313 - RNA, 21 nt, synthetic construct
  source 1..21: mol_type = other RNA
ggccaagggacatagtggaaa

SEQ ID NO: 6314 - RNA, 21 nt, synthetic construct
  source 1..21: mol_type = other RNA
ggcccaggagagtctgatggg

SEQ ID NO: 6315 - RNA, 21 nt, synthetic construct
  source 1..21: mol_type = other RNA
ggccgggctatgcctcccaaa

SEQ ID NO: 6316 - RNA, 21 nt, synthetic construct
  source 1..21: mol_type = other RNA
ggccttttcctgagtagtctg

SEQ ID NO: 6317 - RNA, 21 nt, synthetic construct
  source 1..21: mol_type = other RNA
ggctatgcctcccaaatcaga

SEQ ID NO: 6318 - RNA, 21 nt, synthetic construct
  source 1..21: mol_type = other RNA
ggctgtgcctctcccatcaga

SEQ ID NO: 6319 - RNA, 21 nt, synthetic construct
  source 1..21: mol_type = other RNA
gggaagcgtgaagctggaggc

SEQ ID NO: 6320 - RNA, 21 nt, synthetic construct
  source 1..21: mol_type = other RNA
gggacatagtggaaattagct

SEQ ID NO: 6321 - RNA, 21 nt, synthetic construct
  source 1..21: mol_type = other RNA
gggagaagcttagttctgcct

SEQ ID NO: 6322 - RNA, 21 nt, synthetic construct
  source 1..21: mol_type = other RNA
gggagaggcacagccctctct

SEQ ID NO: 6323 - RNA, 21 nt, synthetic construct
  source 1..21: mol_type = other RNA
gggaggcaggccttttcctga

SEQ ID NO: 6324 - RNA, 21 nt, synthetic construct
  source 1..21: mol_type = other RNA
gggaggcatagcccggcccag

SEQ ID NO: 6325 - RNA, 21 nt, synthetic construct
  source 1..21: mol_type = other RNA
gggccaagggacatagtggaa

SEQ ID NO: 6326 - RNA, 21 nt, synthetic construct
  source 1..21: mol_type = other RNA
gggccgggctatgcctcccaa

SEQ ID NO: 6327 - RNA, 21 nt, synthetic construct
  source 1..21: mol_type = other RNA
gggctatgcctcccaaatcag

SEQ ID NO: 6328 - RNA, 21 nt, synthetic construct
  source 1..21: mol_type = other RNA
gggctgtgcctctcccatcag

SEQ ID NO: 6329 - RNA, 21 nt, synthetic construct
  source 1..21: mol_type = other RNA
ggggaggcaggccttttcctg

SEQ ID NO: 6330 - RNA, 21 nt, synthetic construct
  source 1..21: mol_type = other RNA
ggggccaagggacatagtgga

SEQ ID NO: 6331 - RNA, 21 nt, synthetic construct
  source 1..21: mol_type = other RNA
gggggaggcaggccttttcct

SEQ ID NO: 6332 - RNA, 21 nt, synthetic construct
  source 1..21: mol_type = other RNA
gggggccaagggacatagtgg

SEQ ID NO: 6333 - RNA, 21 nt, synthetic construct
  source 1..21: mol_type = other RNA
ggggggaggcaggccttttcc

SEQ ID NO: 6334 - RNA, 21 nt, synthetic construct
  source 1..21: mol_type = other RNA
ggggtaaccaatccagtgcaa

SEQ ID NO: 6335 - RNA, 21 nt, synthetic construct
  source 1..21: mol_type = other RNA
gggtaaccaatccagtgcaag

SEQ ID NO: 6336 - RNA, 21 nt, synthetic construct
  source 1..21: mol_type = other RNA
ggtaaccaatccagtgcaagt

SEQ ID NO: 6337 - RNA, 21 nt, synthetic construct
  source 1..21: mol_type = other RNA
ggtgggagaagcttagttctg

SEQ ID NO: 6338 - RNA, 21 nt, synthetic construct
  source 1..21: mol_type = other RNA
ggttaccccagctaatttcca

SEQ ID NO: 6339 - RNA, 21 nt, synthetic construct
  source 1..21: mol_type = other RNA
gtaaccaatccagtgcaagtc

SEQ ID NO: 6340 - RNA, 21 nt, synthetic construct
  source 1..21: mol_type = other RNA
gtagtctggtgggagaagctt

SEQ ID NO: 6341 - RNA, 21 nt, synthetic construct
  source 1..21: mol_type = other RNA
gtcaaggcagtgcctccagct

SEQ ID NO: 6342 - RNA, 21 nt, synthetic construct
  source 1..21: mol_type = other RNA
gtctgaggggggaggcaggcc

SEQ ID NO: 6343 - RNA, 21 nt, synthetic construct
  source 1..21: mol_type = other RNA
gtctgatgggagaggcacagc

SEQ ID NO: 6344 - RNA, 21 nt, synthetic construct
  source 1..21: mol_type = other RNA
gtctgatttgggaggcatagc

SEQ ID NO: 6345 - RNA, 21 nt, synthetic construct
  source 1..21: mol_type = other RNA
gtctggtgggagaagcttagt

SEQ ID NO: 6346 - RNA, 21 nt, synthetic construct
  source 1..21: mol_type = other RNA
gtgaagctggaggcactgcct

SEQ ID NO: 6347 - RNA, 21 nt, synthetic construct
  source 1..21: mol_type = other RNA
gtgcaagtcaaggcagtgcct

SEQ ID NO: 6348 - RNA, 21 nt, synthetic construct
  source 1..21: mol_type = other RNA
gtgcagagggggccaagggac

SEQ ID NO: 6349 - RNA, 21 nt, synthetic construct
  source 1..21: mol_type = other RNA
gtgcctccagcttcacgcttc

SEQ ID NO: 6350 - RNA, 21 nt, synthetic construct
  source 1..21: mol_type = other RNA
gtgcctctcccatcagactct

SEQ ID NO: 6351 - RNA, 21 nt, synthetic construct
  source 1..21: mol_type = other RNA
gtggaaattagctggggtaac

SEQ ID NO: 6352 - RNA, 21 nt, synthetic construct
  source 1..21: mol_type = other RNA
gtgggagaagcttagttctgc

SEQ ID NO: 6353 - RNA, 21 nt, synthetic construct
  source 1..21: mol_type = other RNA
gttaccccagctaatttccac

SEQ ID NO: 6354 - RNA, 21 nt, synthetic construct
  source 1..21: mol_type = other RNA
gttctgcctttgagtctgatt

SEQ ID NO: 6355 - RNA, 21 nt, synthetic construct
  source 1..21: mol_type = other RNA
taaccaatccagtgcaagtca

SEQ ID NO: 6356 - RNA, 21 nt, synthetic construct
  source 1..21: mol_type = other RNA
taagcttctcccaccagacta

SEQ ID NO: 6357 - RNA, 21 nt, synthetic construct
  source 1..21: mol_type = other RNA
taatttccactatgtcccttg

SEQ ID NO: 6358 - RNA, 21 nt, synthetic construct
  source 1..21: mol_type = other RNA
taccccagctaatttccacta

SEQ ID NO: 6359 - RNA, 21 nt, synthetic construct
  source 1..21: mol_type = other RNA
tactcaggaaaaggcctgcct

SEQ ID NO: 6360 - RNA, 21 nt, synthetic construct
  source 1..21: mol_type = other RNA
tagagagggctgtgcctctcc

SEQ ID NO: 6361 - RNA, 21 nt, synthetic construct
  source 1..21: mol_type = other RNA
tagcccggcccaggagagtct

SEQ ID NO: 6362 - RNA, 21 nt, synthetic construct
  source 1..21: mol_type = other RNA
tagctggggtaaccaatccag

SEQ ID NO: 6363 - RNA, 21 nt, synthetic construct
  source 1..21: mol_type = other RNA
tagggaagcgtgaagctggag

SEQ ID NO: 6364 - RNA, 21 nt, synthetic construct
  source 1..21: mol_type = other RNA
tagtctggtgggagaagctta

SEQ ID NO: 6365 - RNA, 21 nt, synthetic construct
  source 1..21: mol_type = other RNA
tagtggaaattagctggggta

SEQ ID NO: 6366 - RNA, 21 nt, synthetic construct
  source 1..21: mol_type = other RNA
tagttctgcctttgagtctga

SEQ ID NO: 6367 - RNA, 21 nt, synthetic construct
  source 1..21: mol_type = other RNA
tatgcctcccaaatcagactc

SEQ ID NO: 6368 - RNA, 21 nt, synthetic construct
  source 1..21: mol_type = other RNA
tatgtcccttggccccctctg

SEQ ID NO: 6369 - RNA, 21 nt, synthetic construct
  source 1..21: mol_type = other RNA
tcaaaggcagaactaagcttc

SEQ ID NO: 6370 - RNA, 21 nt, synthetic construct
  source 1..21: mol_type = other RNA
tcaaggcagtgcctccagctt

SEQ ID NO: 6371 - RNA, 21 nt, synthetic construct
  source 1..21: mol_type = other RNA
tcacgcttccctagagagggc

SEQ ID NO: 6372 - RNA, 21 nt, synthetic construct
  source 1..21: mol_type = other RNA
tcagactcaaaggcagaacta

SEQ ID NO: 6373 - RNA, 21 nt, synthetic construct
  source 1..21: mol_type = other RNA
tcagactctcctgggccgggc

SEQ ID NO: 6374 - RNA, 21 nt, synthetic construct
  source 1..21: mol_type = other RNA
tcaggaaaaggcctgcctccc

SEQ ID NO: 6375 - RNA, 21 nt, synthetic construct
  source 1..21: mol_type = other RNA
tccactatgtcccttggcccc

SEQ ID NO: 6376 - RNA, 21 nt, synthetic construct
  source 1..21: mol_type = other RNA
tccagcttcacgcttccctag

SEQ ID NO: 6377 - RNA, 21 nt, synthetic construct
  source 1..21: mol_type = other RNA
tccagtgcaagtcaaggcagt

SEQ ID NO: 6378 - RNA, 21 nt, synthetic construct
  source 1..21: mol_type = other RNA
tcccaaatcagactcaaaggc

SEQ ID NO: 6379 - RNA, 21 nt, synthetic construct
  source 1..21: mol_type = other RNA
tcccaccagactactcaggaa

SEQ ID NO: 6380 - RNA, 21 nt, synthetic construct
  source 1..21: mol_type = other RNA
tcccatcagactctcctgggc

SEQ ID NO: 6381 - RNA, 21 nt, synthetic construct
  source 1..21: mol_type = other RNA
tccctagagagggctgtgcct

SEQ ID NO: 6382 - RNA, 21 nt, synthetic construct
  source 1..21: mol_type = other RNA
tcctgagtagtctggtgggag

SEQ ID NO: 6383 - RNA, 21 nt, synthetic construct
  source 1..21: mol_type = other RNA
tcctgggccgggctatgcctc

SEQ ID NO: 6384 - RNA, 21 nt, synthetic construct
  source 1..21: mol_type = other RNA
tctagggaagcgtgaagctgg

SEQ ID NO: 6385 - RNA, 21 nt, synthetic construct
  source 1..21: mol_type = other RNA
tctcccaccagactactcagg

SEQ ID NO: 6386 - RNA, 21 nt, synthetic construct
  source 1..21: mol_type = other RNA
tctcccatcagactctcctgg

SEQ ID NO: 6387 - RNA, 21 nt, synthetic construct
  source 1..21: mol_type = other RNA
tctcctgggccgggctatgcc

SEQ ID NO: 6388 - RNA, 21 nt, synthetic construct
  source 1..21: mol_type = other RNA
tctctagggaagcgtgaagct

SEQ ID NO: 6389 - RNA, 21 nt, synthetic construct
  source 1..21: mol_type = other RNA
tctgaggggggaggcaggcct

SEQ ID NO: 6390 - RNA, 21 nt, synthetic construct
  source 1..21: mol_type = other RNA
tctgatgggagaggcacagcc

SEQ ID NO: 6391 - RNA, 21 nt, synthetic construct
  source 1..21: mol_type = other RNA
tctgatttgggaggcatagcc

SEQ ID NO: 6392 - RNA, 21 nt, synthetic construct
  source 1..21: mol_type = other RNA
tctgcctttgagtctgatttg

SEQ ID NO: 6393 - RNA, 21 nt, synthetic construct
  source 1..21: mol_type = other RNA
tctggtgggagaagcttagtt

SEQ ID NO: 6394 - RNA, 21 nt, synthetic construct
  source 1..21: mol_type = other RNA
tgaagctggaggcactgcctt

SEQ ID NO: 6395 - RNA, 21 nt, synthetic construct
  source 1..21: mol_type = other RNA
tgacttgcactggattggtta

SEQ ID NO: 6396 - RNA, 21 nt, synthetic construct
  source 1..21: mol_type = other RNA
tgaggggggaggcaggccttt

SEQ ID NO: 6397 - RNA, 21 nt, synthetic construct
  source 1..21: mol_type = other RNA
tgagtagtctggtgggagaag

SEQ ID NO: 6398 - RNA, 21 nt, synthetic construct
  source 1..21: mol_type = other RNA
tgagtctgatttgggaggcat

SEQ ID NO: 6399 - RNA, 21 nt, synthetic construct
  source 1..21: mol_type = other RNA
tgatgggagaggcacagccct

SEQ ID NO: 6400 - RNA, 21 nt, synthetic construct
  source 1..21: mol_type = other RNA
tgatttgggaggcatagcccg

SEQ ID NO: 6401 - RNA, 21 nt, synthetic construct
  source 1..21: mol_type = other RNA
tgcaagtcaaggcagtgcctc

SEQ ID NO: 6402 - RNA, 21 nt, synthetic construct
  source 1..21: mol_type = other RNA
tgcactggattggttacccca

SEQ ID NO: 6403 - RNA, 21 nt, synthetic construct
  source 1..21: mol_type = other RNA
tgcagagggggccaagggaca

SEQ ID NO: 6404 - RNA, 21 nt, synthetic construct
  source 1..21: mol_type = other RNA
tgcctccagcttcacgcttcc

SEQ ID NO: 6405 - RNA, 21 nt, synthetic construct
  source 1..21: mol_type = other RNA
tgcctcccaaatcagactcaa

SEQ ID NO: 6406 - RNA, 21 nt, synthetic construct
  source 1..21: mol_type = other RNA
tgcctctcccatcagactctc

SEQ ID NO: 6407 - RNA, 21 nt, synthetic construct
  source 1..21: mol_type = other RNA
tgccttgacttgcactggatt

SEQ ID NO: 6408 - RNA, 21 nt, synthetic construct
  source 1..21: mol_type = other RNA
tgcctttgagtctgatttggg

SEQ ID NO: 6409 - RNA, 21 nt, synthetic construct
  source 1..21: mol_type = other RNA
tggaaattagctggggtaacc

SEQ ID NO: 6410 - RNA, 21 nt, synthetic construct
  source 1..21: mol_type = other RNA
tggaggcactgccttgacttg

SEQ ID NO: 6411 - RNA, 21 nt, synthetic construct
  source 1..21: mol_type = other RNA
tggattggttaccccagctaa

SEQ ID NO: 6412 - RNA, 21 nt, synthetic construct
  source 1..21: mol_type = other RNA
tgggagaagcttagttctgcc

SEQ ID NO: 6413 - RNA, 21 nt, synthetic construct
  source 1..21: mol_type = other RNA
tgggagaggcacagccctctc

SEQ ID NO: 6414 - RNA, 21 nt, synthetic construct
  source 1..21: mol_type = other RNA
tgggaggcatagcccggccca

SEQ ID NO: 6415 - RNA, 21 nt, synthetic construct
  source 1..21: mol_type = other RNA
tgggccgggctatgcctccca

SEQ ID NO: 6416 - RNA, 21 nt, synthetic construct
  source 1..21: mol_type = other RNA
tggggtaaccaatccagtgca

SEQ ID NO: 6417 - RNA, 21 nt, synthetic construct
  source 1..21: mol_type = other RNA
tggtgggagaagcttagttct

SEQ ID NO: 6418 - RNA, 21 nt, synthetic construct
  source 1..21: mol_type = other RNA
tggttaccccagctaatttcc

SEQ ID NO: 6419 - RNA, 21 nt, synthetic construct
  source 1..21: mol_type = other RNA
tgtgcctctcccatcagactc

SEQ ID NO: 6420 - RNA, 21 nt, synthetic construct
  source 1..21: mol_type = other RNA
ttaccccagctaatttccact

SEQ ID NO: 6421 - RNA, 21 nt, synthetic construct
  source 1..21: mol_type = other RNA
ttagctggggtaaccaatcca

SEQ ID NO: 6422 - RNA, 21 nt, synthetic construct
  source 1..21: mol_type = other RNA
ttagttctgcctttgagtctg

SEQ ID NO: 6423 - RNA, 21 nt, synthetic construct
  source 1..21: mol_type = other RNA
ttcacgcttccctagagaggg

SEQ ID NO: 6424 - RNA, 21 nt, synthetic construct
  source 1..21: mol_type = other RNA
ttccactatgtcccttggccc

SEQ ID NO: 6425 - RNA, 21 nt, synthetic construct
  source 1..21: mol_type = other RNA
ttccctagagagggctgtgcc

SEQ ID NO: 6426 - RNA, 21 nt, synthetic construct
  source 1..21: mol_type = other RNA
ttcctgagtagtctggtggga

SEQ ID NO: 6427 - RNA, 21 nt, synthetic construct
  source 1..21: mol_type = other RNA
ttctcccaccagactactcag

SEQ ID NO: 6428 - RNA, 21 nt, synthetic construct
  source 1..21: mol_type = other RNA
ttctgcctttgagtctgattt

SEQ ID NO: 6429 - RNA, 21 nt, synthetic construct
  source 1..21: mol_type = other RNA
ttgacttgcactggattggtt

SEQ ID NO: 6430 - RNA, 21 nt, synthetic construct
  source 1..21: mol_type = other RNA
ttgagtctgatttgggaggca

SEQ ID NO: 6431 - RNA, 21 nt, synthetic construct
  source 1..21: mol_type = other RNA
ttgcactggattggttacccc

SEQ ID NO: 6432 - RNA, 21 nt, synthetic construct
  source 1..21: mol_type = other RNA
ttgggaggcatagcccggccc

SEQ ID NO: 6433 - RNA, 21 nt, synthetic construct
  source 1..21: mol_type = other RNA
ttggttaccccagctaatttc

SEQ ID NO: 6434 - RNA, 21 nt, synthetic construct
  source 1..21: mol_type = other RNA
tttccactatgtcccttggcc

SEQ ID NO: 6435 - RNA, 21 nt, synthetic construct
  source 1..21: mol_type = other RNA
tttcctgagtagtctggtggg

SEQ ID NO: 6436 - RNA, 21 nt, synthetic construct
  source 1..21: mol_type = other RNA
tttgagtctgatttgggaggc

SEQ ID NO: 6437 - RNA, 21 nt, synthetic construct
  source 1..21: mol_type = other RNA
tttgggaggcatagcccggcc

SEQ ID NO: 6438 - RNA, 21 nt, synthetic construct
  source 1..21: mol_type = other RNA
ttttcctgagtagtctggtgg

SEQ ID NO: 6439 - RNA, 22 nt, synthetic construct
  source 1..22: mol_type = other RNA
aaaggcagaactaagcttctcc

SEQ ID NO: 6440 - RNA, 22 nt, synthetic construct
  source 1..22: mol_type = other RNA
aaatcagactcaaaggcagaac

SEQ ID NO: 6441 - RNA, 22 nt, synthetic construct
  source 1..22: mol_type = other RNA
aaattagctggggtaaccaatc

SEQ ID NO: 6442 - RNA, 22 nt, synthetic construct
  source 1..22: mol_type = other RNA
aaccaatccagtgcaagtcaag

SEQ ID NO: 6443 - RNA, 22 nt, synthetic construct
  source 1..22: mol_type = other RNA
aactaagcttctcccaccagac

SEQ ID NO: 6444 - RNA, 22 nt, synthetic construct
  source 1..22: mol_type = other RNA
aagcgtgaagctggaggcactg

SEQ ID NO: 6445 - RNA, 22 nt, synthetic construct
  source 1..22: mol_type = other RNA
aagctggaggcactgccttgac

SEQ ID NO: 6446 - RNA, 22 nt, synthetic construct
  source 1..22: mol_type = other RNA
aagcttagttctgcctttgagt

SEQ ID NO: 6447 - RNA, 22 nt, synthetic construct
  source 1..22: mol_type = other RNA
aagcttctcccaccagactact

SEQ ID NO: 6448 - RNA, 22 nt, synthetic construct
  source 1..22: mol_type = other RNA
aaggcagaactaagcttctccc

SEQ ID NO: 6449 - RNA, 22 nt, synthetic construct
  source 1..22: mol_type = other RNA
aaggcagtgcctccagcttcac

SEQ ID NO: 6450 - RNA, 22 nt, synthetic construct
  source 1..22: mol_type = other RNA
aagggacatagtggaaattagc

SEQ ID NO: 6451 - RNA, 22 nt, synthetic construct
  source 1..22: mol_type = other RNA
aagtcaaggcagtgcctccagc

SEQ ID NO: 6452 - RNA, 22 nt, synthetic construct
  source 1..22: mol_type = other RNA
aagtgcagagggggccaaggga

SEQ ID NO: 6453 - RNA, 22 nt, synthetic construct
  source 1..22: mol_type = other RNA
aatcagactcaaaggcagaact

SEQ ID NO: 6454 - RNA, 22 nt, synthetic construct
  source 1..22: mol_type = other RNA
aatccagtgcaagtcaaggcag

SEQ ID NO: 6455 - RNA, 22 nt, synthetic construct
  source 1..22: mol_type = other RNA
aattagctggggtaaccaatcc

SEQ ID NO: 6456 - RNA, 22 nt, synthetic construct
  source 1..22: mol_type = other RNA
aatttccactatgtcccttggc

SEQ ID NO: 6457 - RNA, 22 nt, synthetic construct
  source 1..22: mol_type = other RNA
acagccctctctagggaagcgt

SEQ ID NO: 6458 - RNA, 22 nt, synthetic construct
  source 1..22: mol_type = other RNA
acatagtggaaattagctgggg

SEQ ID NO: 6459 - RNA, 22 nt, synthetic construct
  source 1..22: mol_type = other RNA
accaatccagtgcaagtcaagg

SEQ ID NO: 6460 - RNA, 22 nt, synthetic construct
  source 1..22: mol_type = other RNA
accagactactcaggaaaaggc

SEQ ID NO: 6461 - RNA, 22 nt, synthetic construct
  source 1..22: mol_type = other RNA
accccagctaatttccactatg

SEQ ID NO: 6462 - RNA, 22 nt, synthetic construct
  source 1..22: mol_type = other RNA
acgcttccctagagagggctgt

SEQ ID NO: 6463 - RNA, 22 nt, synthetic construct
  source 1..22: mol_type = other RNA
actaagcttctcccaccagact

SEQ ID NO: 6464 - RNA, 22 nt, synthetic construct
  source 1..22: mol_type = other RNA
actactcaggaaaaggcctgcc

SEQ ID NO: 6465 - RNA, 22 nt, synthetic construct
  source 1..22: mol_type = other RNA
actatgtcccttggccccctct

SEQ ID NO: 6466 - RNA, 22 nt, synthetic construct
  source 1..22: mol_type = other RNA
actcaaaggcagaactaagctt

SEQ ID NO: 6467 - RNA, 22 nt, synthetic construct
  source 1..22: mol_type = other RNA
actcaggaaaaggcctgcctcc

SEQ ID NO: 6468 - RNA, 22 nt, synthetic construct
  source 1..22: mol_type = other RNA
actctcctgggccgggctatgc

SEQ ID NO: 6469 - RNA, 22 nt, synthetic construct
  source 1..22: mol_type = other RNA
actgccttgacttgcactggat

SEQ ID NO: 6470 - RNA, 22 nt, synthetic construct
  source 1..22: mol_type = other RNA
actggattggttaccccagcta

SEQ ID NO: 6471 - RNA, 22 nt, synthetic construct
  source 1..22: mol_type = other RNA
acttgcactggattggttaccc

SEQ ID NO: 6472 - RNA, 22 nt, synthetic construct
  source 1..22: mol_type = other RNA
agaactaagcttctcccaccag

SEQ ID NO: 6473 - RNA, 22 nt, synthetic construct
  source 1..22: mol_type = other RNA
agaagcttagttctgcctttga

SEQ ID NO: 6474 - RNA, 22 nt, synthetic construct
  source 1..22: mol_type = other RNA
agactactcaggaaaaggcctg

SEQ ID NO: 6475 - RNA, 22 nt, synthetic construct
  source 1..22: mol_type = other RNA
agactcaaaggcagaactaagc

SEQ ID NO: 6476 - RNA, 22 nt, synthetic construct
  source 1..22: mol_type = other RNA
agactctcctgggccgggctat

SEQ ID NO: 6477 - RNA, 22 nt, synthetic construct
  source 1..22: mol_type = other RNA
agagagggctgtgcctctccca

SEQ ID NO: 6478 - RNA, 22 nt, synthetic construct
  source 1..22: mol_type = other RNA
agaggcacagccctctctaggg

SEQ ID NO: 6479 - RNA, 22 nt, synthetic construct
  source 1..22: mol_type = other RNA
agagggctgtgcctctcccatc

SEQ ID NO: 6480 - RNA, 22 nt, synthetic construct
  source 1..22: mol_type = other RNA
agagggggccaagggacatagt

SEQ ID NO: 6481 - RNA, 22 nt, synthetic construct
  source 1..22: mol_type = other RNA
agagtctgatgggagaggcaca

SEQ ID NO: 6482 - RNA, 22 nt, synthetic construct
  source 1..22: mol_type = other RNA
agcccggcccaggagagtctga

SEQ ID NO: 6483 - RNA, 22 nt, synthetic construct
  source 1..22: mol_type = other RNA
agccctctctagggaagcgtga

SEQ ID NO: 6484 - RNA, 22 nt, synthetic construct
  source 1..22: mol_type = other RNA
agcgtgaagctggaggcactgc

SEQ ID NO: 6485 - RNA, 22 nt, synthetic construct
  source 1..22: mol_type = other RNA
agctaatttccactatgtccct

SEQ ID NO: 6486 - RNA, 22 nt, synthetic construct
  source 1..22: mol_type = other RNA
agctggaggcactgccttgact

SEQ ID NO: 6487 - RNA, 22 nt, synthetic construct
  source 1..22: mol_type = other RNA
agctggggtaaccaatccagtg

SEQ ID NO: 6488 - RNA, 22 nt, synthetic construct
  source 1..22: mol_type = other RNA
agcttagttctgcctttgagtc

SEQ ID NO: 6489 - RNA, 22 nt, synthetic construct
  source 1..22: mol_type = other RNA
agcttcacgcttccctagagag

SEQ ID NO: 6490 - RNA, 22 nt, synthetic construct
  source 1..22: mol_type = other RNA
agcttctcccaccagactactc

SEQ ID NO: 6491 - RNA, 22 nt, synthetic construct
  source 1..22: mol_type = other RNA
aggagagtctgatgggagaggc

SEQ ID NO: 6492 - RNA, 22 nt, synthetic construct
  source 1..22: mol_type = other RNA
aggcaagtgcagagggggccaa

SEQ ID NO: 6493 - RNA, 22 nt, synthetic construct
  source 1..22: mol_type = other RNA
aggcacagccctctctagggaa

SEQ ID NO: 6494 - RNA, 22 nt, synthetic construct
  source 1..22: mol_type = other RNA
aggcactgccttgacttgcact

SEQ ID NO: 6495 - RNA, 22 nt, synthetic construct
  source 1..22: mol_type = other RNA
aggcagaactaagcttctccca

SEQ ID NO: 6496 - RNA, 22 nt, synthetic construct
  source 1..22: mol_type = other RNA
aggcaggccttttcctgagtag

SEQ ID NO: 6497 - RNA, 22 nt, synthetic construct
  source 1..22: mol_type = other RNA
aggcagtgcctccagcttcacg

SEQ ID NO: 6498 - RNA, 22 nt, synthetic construct
  source 1..22: mol_type = other RNA
aggcatagcccggcccaggaga

SEQ ID NO: 6499 - RNA, 22 nt, synthetic construct
  source 1..22: mol_type = other RNA
aggccttttcctgagtagtctg

SEQ ID NO: 6500 - RNA, 22 nt, synthetic construct
  source 1..22: mol_type = other RNA
agggaagcgtgaagctggaggc

SEQ ID NO: 6501 - RNA, 22 nt, synthetic construct
  source 1..22: mol_type = other RNA
agggacatagtggaaattagct

SEQ ID NO: 6502 - RNA, 22 nt, synthetic construct
  source 1..22: mol_type = other RNA
agggctgtgcctctcccatcag

SEQ ID NO: 6503 - RNA, 22 nt, synthetic construct
  source 1..22: mol_type = other RNA
agggggccaagggacatagtgg

SEQ ID NO: 6504 - RNA, 22 nt, synthetic construct
  source 1..22: mol_type = other RNA
aggggggaggcaggccttttcc

SEQ ID NO: 6505 - RNA, 22 nt, synthetic construct
  source 1..22: mol_type = other RNA
agtagtctggtgggagaagctt

SEQ ID NO: 6506 - RNA, 22 nt, synthetic construct
  source 1..22: mol_type = other RNA
agtcaaggcagtgcctccagct

SEQ ID NO: 6507 - RNA, 22 nt, synthetic construct
  source 1..22: mol_type = other RNA
agtctgaggggggaggcaggcc

SEQ ID NO: 6508 - RNA, 22 nt, synthetic construct
  source 1..22: mol_type = other RNA
agtctgatgggagaggcacagc

SEQ ID NO: 6509 - RNA, 22 nt, synthetic construct
  source 1..22: mol_type = other RNA
agtctgatttgggaggcatagc

SEQ ID NO: 6510 - RNA, 22 nt, synthetic construct
  source 1..22: mol_type = other RNA
agtctggtgggagaagcttagt

SEQ ID NO: 6511 - RNA, 22 nt, synthetic construct
  source 1..22: mol_type = other RNA
agtgcaagtcaaggcagtgcct

SEQ ID NO: 6512 - RNA, 22 nt, synthetic construct
  source 1..22: mol_type = other RNA
agtgcagagggggccaagggac

SEQ ID NO: 6513 - RNA, 22 nt, synthetic construct
  source 1..22: mol_type = other RNA
agtgcctccagcttcacgcttc

SEQ ID NO: 6514 - RNA, 22 nt, synthetic construct
  source 1..22: mol_type = other RNA
agtggaaattagctggggtaac

SEQ ID NO: 6515 - RNA, 22 nt, synthetic construct
  source 1..22: mol_type = other RNA
agttctgcctttgagtctgatt

SEQ ID NO: 6516 - RNA, 22 nt, synthetic construct
  source 1..22: mol_type = other RNA
atagcccggcccaggagagtct

SEQ ID NO: 6517 - RNA, 22 nt, synthetic construct
  source 1..22: mol_type = other RNA
atagtggaaattagctggggta

SEQ ID NO: 6518 - RNA, 22 nt, synthetic construct
  source 1..22: mol_type = other RNA
atcagactcaaaggcagaacta

SEQ ID NO: 6519 - RNA, 22 nt, synthetic construct
  source 1..22: mol_type = other RNA
atcagactctcctgggccgggc

SEQ ID NO: 6520 - RNA, 22 nt, synthetic construct
  source 1..22: mol_type = other RNA
atccagtgcaagtcaaggcagt

SEQ ID NO: 6521 - RNA, 22 nt, synthetic construct
  source 1..22: mol_type = other RNA
atgcctcccaaatcagactcaa

SEQ ID NO: 6522 - RNA, 22 nt, synthetic construct
  source 1..22: mol_type = other RNA
atgggagaggcacagccctctc

SEQ ID NO: 6523 - RNA, 22 nt, synthetic construct
  source 1..22: mol_type = other RNA
attagctggggtaaccaatcca

SEQ ID NO: 6524 - RNA, 22 nt, synthetic construct
  source 1..22: mol_type = other RNA
attggttaccccagctaatttc

SEQ ID NO: 6525 - RNA, 22 nt, synthetic construct
  source 1..22: mol_type = other RNA
atttccactatgtcccttggcc

SEQ ID NO: 6526 - RNA, 22 nt, synthetic construct
  source 1..22: mol_type = other RNA
atttgggaggcatagcccggcc

SEQ ID NO: 6527 - RNA, 22 nt, synthetic construct
  source 1..22: mol_type = other RNA
caaaggcagaactaagcttctc

SEQ ID NO: 6528 - RNA, 22 nt, synthetic construct
  source 1..22: mol_type = other RNA
caaatcagactcaaaggcagaa

SEQ ID NO: 6529 - RNA, 22 nt, synthetic construct
  source 1..22: mol_type = other RNA
caaggcagtgcctccagcttca

SEQ ID NO: 6530 - RNA, 22 nt, synthetic construct
  source 1..22: mol_type = other RNA
caagggacatagtggaaattag

SEQ ID NO: 6531 - RNA, 22 nt, synthetic construct
  source 1..22: mol_type = other RNA
caagtcaaggcagtgcctccag

SEQ ID NO: 6532 - RNA, 22 nt, synthetic construct
  source 1..22: mol_type = other RNA
caagtgcagagggggccaaggg

SEQ ID NO: 6533 - RNA, 22 nt, synthetic construct
  source 1..22: mol_type = other RNA
caatccagtgcaagtcaaggca

SEQ ID NO: 6534 - RNA, 22 nt, synthetic construct
  source 1..22: mol_type = other RNA
cacagccctctctagggaagcg

SEQ ID NO: 6535 - RNA, 22 nt, synthetic construct
  source 1..22: mol_type = other RNA
caccagactactcaggaaaagg

SEQ ID NO: 6536 - RNA, 22 nt, synthetic construct
  source 1..22: mol_type = other RNA
cacgcttccctagagagggctg

SEQ ID NO: 6537 - RNA, 22 nt, synthetic construct
  source 1..22: mol_type = other RNA
cactatgtcccttggccccctc

SEQ ID NO: 6538 - RNA, 22 nt, synthetic construct
  source 1..22: mol_type = other RNA
cactgccttgacttgcactgga

SEQ ID NO: 6539 - RNA, 22 nt, synthetic construct
  source 1..22: mol_type = other RNA
cactggattggttaccccagct

SEQ ID NO: 6540 - RNA, 22 nt, synthetic construct
  source 1..22: mol_type = other RNA
cagaactaagcttctcccacca

SEQ ID NO: 6541 - RNA, 22 nt, synthetic construct
  source 1..22: mol_type = other RNA
cagactactcaggaaaaggcct

SEQ ID NO: 6542 - RNA, 22 nt, synthetic construct
  source 1..22: mol_type = other RNA
cagactcaaaggcagaactaag

SEQ ID NO: 6543 - RNA, 22 nt, synthetic construct
  source 1..22: mol_type = other RNA
cagactctcctgggccgggcta

SEQ ID NO: 6544 - RNA, 22 nt, synthetic construct
  source 1..22: mol_type = other RNA
cagagggggccaagggacatag

SEQ ID NO: 6545 - RNA, 22 nt, synthetic construct
  source 1..22: mol_type = other RNA
cagccctctctagggaagcgtg

SEQ ID NO: 6546 - RNA, 22 nt, synthetic construct
  source 1..22: mol_type = other RNA
cagctaatttccactatgtccc

SEQ ID NO: 6547 - RNA, 22 nt, synthetic construct
  source 1..22: mol_type = other RNA
cagcttcacgcttccctagaga

SEQ ID NO: 6548 - RNA, 22 nt, synthetic construct
  source 1..22: mol_type = other RNA
caggaaaaggcctgcctccccc

SEQ ID NO: 6549 - RNA, 22 nt, synthetic construct
  source 1..22: mol_type = other RNA
caggagagtctgatgggagagg

SEQ ID NO: 6550 - RNA, 22 nt, synthetic construct
  source 1..22: mol_type = other RNA
caggccttttcctgagtagtct

SEQ ID NO: 6551 - RNA, 22 nt, synthetic construct
  source 1..22: mol_type = other RNA
cagtgcaagtcaaggcagtgcc

SEQ ID NO: 6552 - RNA, 22 nt, synthetic construct
  source 1..22: mol_type = other RNA
cagtgcctccagcttcacgctt

SEQ ID NO: 6553 - RNA, 22 nt, synthetic construct
  source 1..22: mol_type = other RNA
catagcccggcccaggagagtc

SEQ ID NO: 6554 - RNA, 22 nt, synthetic construct
  source 1..22: mol_type = other RNA
catagtggaaattagctggggt

SEQ ID NO: 6555 - RNA, 22 nt, synthetic construct
  source 1..22: mol_type = other RNA
catcagactctcctgggccggg

SEQ ID NO: 6556 - RNA, 22 nt, synthetic construct
  source 1..22: mol_type = other RNA
ccaaatcagactcaaaggcaga

SEQ ID NO: 6557 - RNA, 22 nt, synthetic construct
  source 1..22: mol_type = other RNA
ccaagggacatagtggaaatta

SEQ ID NO: 6558 - RNA, 22 nt, synthetic construct
  source 1..22: mol_type = other RNA
ccaatccagtgcaagtcaaggc

SEQ ID NO: 6559 - RNA, 22 nt, synthetic construct
  source 1..22: mol_type = other RNA
ccaccagactactcaggaaaag

SEQ ID NO: 6560 - RNA, 22 nt, synthetic construct
  source 1..22: mol_type = other RNA
ccactatgtcccttggccccct

SEQ ID NO: 6561 - RNA, 22 nt, synthetic construct
  source 1..22: mol_type = other RNA
ccagactactcaggaaaaggcc

SEQ ID NO: 6562 - RNA, 22 nt, synthetic construct
  source 1..22: mol_type = other RNA
ccagctaatttccactatgtcc

SEQ ID NO: 6563 - RNA, 22 nt, synthetic construct
  source 1..22: mol_type = other RNA
ccagcttcacgcttccctagag

SEQ ID NO: 6564 - RNA, 22 nt, synthetic construct
  source 1..22: mol_type = other RNA
ccaggagagtctgatgggagag

SEQ ID NO: 6565 - RNA, 22 nt, synthetic construct
  source 1..22: mol_type = other RNA
ccagtgcaagtcaaggcagtgc

SEQ ID NO: 6566 - RNA, 22 nt, synthetic construct
  source 1..22: mol_type = other RNA
ccatcagactctcctgggccgg

SEQ ID NO: 6567 - RNA, 22 nt, synthetic construct
  source 1..22: mol_type = other RNA
cccaaatcagactcaaaggcag

SEQ ID NO: 6568 - RNA, 22 nt, synthetic construct
  source 1..22: mol_type = other RNA
cccaccagactactcaggaaaa

SEQ ID NO: 6569 - RNA, 22 nt, synthetic construct
  source 1..22: mol_type = other RNA
cccagctaatttccactatgtc

SEQ ID NO: 6570 - RNA, 22 nt, synthetic construct
  source 1..22: mol_type = other RNA
cccaggagagtctgatgggaga

SEQ ID NO: 6571 - RNA, 22 nt, synthetic construct
  source 1..22: mol_type = other RNA
cccatcagactctcctgggccg

SEQ ID NO: 6572 - RNA, 22 nt, synthetic construct
  source 1..22: mol_type = other RNA
ccccagctaatttccactatgt

SEQ ID NO: 6573 - RNA, 22 nt, synthetic construct
  source 1..22: mol_type = other RNA
cccggcccaggagagtctgatg

SEQ ID NO: 6574 - RNA, 22 nt, synthetic construct
  source 1..22: mol_type = other RNA
ccctagagagggctgtgcctct

SEQ ID NO: 6575 - RNA, 22 nt, synthetic construct
  source 1..22: mol_type = other RNA
ccctctctagggaagcgtgaag

SEQ ID NO: 6576 - RNA, 22 nt, synthetic construct
  source 1..22: mol_type = other RNA
ccggcccaggagagtctgatgg

SEQ ID NO: 6577 - RNA, 22 nt, synthetic construct
  source 1..22: mol_type = other RNA
ccgggctatgcctcccaaatca

SEQ ID NO: 6578 - RNA, 22 nt, synthetic construct
  source 1..22: mol_type = other RNA
cctagagagggctgtgcctctc

SEQ ID NO: 6579 - RNA, 22 nt, synthetic construct
  source 1..22: mol_type = other RNA
cctccagcttcacgcttcccta

SEQ ID NO: 6580 - RNA, 22 nt, synthetic construct
  source 1..22: mol_type = other RNA
cctcccaaatcagactcaaagg

SEQ ID NO: 6581 - RNA, 22 nt, synthetic construct
  source 1..22: mol_type = other RNA
cctctcccatcagactctcctg

SEQ ID NO: 6582 - RNA, 22 nt, synthetic construct
  source 1..22: mol_type = other RNA
cctctctagggaagcgtgaagc

SEQ ID NO: 6583 - RNA, 22 nt, synthetic construct
  source 1..22: mol_type = other RNA
cctgagtagtctggtgggagaa

SEQ ID NO: 6584 - RNA, 22 nt, synthetic construct
  source 1..22: mol_type = other RNA
cctgggccgggctatgcctccc

SEQ ID NO: 6585 - RNA, 22 nt, synthetic construct
  source 1..22: mol_type = other RNA
ccttgacttgcactggattggt

SEQ ID NO: 6586 - RNA, 22 nt, synthetic construct
  source 1..22: mol_type = other RNA
cctttgagtctgatttgggagg

SEQ ID NO: 6587 - RNA, 22 nt, synthetic construct
  source 1..22: mol_type = other RNA
ccttttcctgagtagtctggtg

SEQ ID NO: 6588 - RNA, 22 nt, synthetic construct
  source 1..22: mol_type = other RNA
cgcttccctagagagggctgtg

SEQ ID NO: 6589 - RNA, 22 nt, synthetic construct
  source 1..22: mol_type = other RNA
cggcccaggagagtctgatggg

SEQ ID NO: 6590 - RNA, 22 nt, synthetic construct
  source 1..22: mol_type = other RNA
cgggctatgcctcccaaatcag

SEQ ID NO: 6591 - RNA, 22 nt, synthetic construct
  source 1..22: mol_type = other RNA
cgtgaagctggaggcactgcct

SEQ ID NO: 6592 - RNA, 22 nt, synthetic construct
  source 1..22: mol_type = other RNA
ctaagcttctcccaccagacta

SEQ ID NO: 6593 - RNA, 22 nt, synthetic construct
  source 1..22: mol_type = other RNA
ctaatttccactatgtcccttg

SEQ ID NO: 6594 - RNA, 22 nt, synthetic construct
  source 1..22: mol_type = other RNA
ctactcaggaaaaggcctgcct

SEQ ID NO: 6595 - RNA, 22 nt, synthetic construct
  source 1..22: mol_type = other RNA
ctagagagggctgtgcctctcc

SEQ ID NO: 6596 - RNA, 22 nt, synthetic construct
  source 1..22: mol_type = other RNA
ctagggaagcgtgaagctggag

SEQ ID NO: 6597 - RNA, 22 nt, synthetic construct
  source 1..22: mol_type = other RNA
ctatgcctcccaaatcagactc

SEQ ID NO: 6598 - RNA, 22 nt, synthetic construct
  source 1..22: mol_type = other RNA
ctatgtcccttggccccctctg

SEQ ID NO: 6599 - RNA, 22 nt, synthetic construct
  source 1..22: mol_type = other RNA
ctcaaaggcagaactaagcttc

SEQ ID NO: 6600 - RNA, 22 nt, synthetic construct
  source 1..22: mol_type = other RNA
ctcaggaaaaggcctgcctccc

SEQ ID NO: 6601 - RNA, 22 nt, synthetic construct
  source 1..22: mol_type = other RNA
ctccagcttcacgcttccctag

SEQ ID NO: 6602 - RNA, 22 nt, synthetic construct
  source 1..22: mol_type = other RNA
ctcccaaatcagactcaaaggc

SEQ ID NO: 6603 - RNA, 22 nt, synthetic construct
  source 1..22: mol_type = other RNA
ctcccaccagactactcaggaa

SEQ ID NO: 6604 - RNA, 22 nt, synthetic construct
  source 1..22: mol_type = other RNA
ctcccatcagactctcctgggc

SEQ ID NO: 6605 - RNA, 22 nt, synthetic construct
  source 1..22: mol_type = other RNA
ctcctgggccgggctatgcctc

SEQ ID NO: 6606 - RNA, 22 nt, synthetic construct
  source 1..22: mol_type = other RNA
ctctagggaagcgtgaagctgg

SEQ ID NO: 6607 - RNA, 22 nt, synthetic construct
  source 1..22: mol_type = other RNA
ctctcccatcagactctcctgg

SEQ ID NO: 6608 - RNA, 22 nt, synthetic construct
  source 1..22: mol_type = other RNA
ctctcctgggccgggctatgcc

SEQ ID NO: 6609 - RNA, 22 nt, synthetic construct
  source 1..22: mol_type = other RNA
ctctctagggaagcgtgaagct

SEQ ID NO: 6610 - RNA, 22 nt, synthetic construct
  source 1..22: mol_type = other RNA
ctgaggggggaggcaggccttt

SEQ ID NO: 6611 - RNA, 22 nt, synthetic construct
  source 1..22: mol_type = other RNA
ctgagtagtctggtgggagaag

SEQ ID NO: 6612 - RNA, 22 nt, synthetic construct
  source 1..22: mol_type = other RNA
ctgatgggagaggcacagccct

SEQ ID NO: 6613 - RNA, 22 nt, synthetic construct
  source 1..22: mol_type = other RNA
ctgatttgggaggcatagcccg

SEQ ID NO: 6614 - RNA, 22 nt, synthetic construct
  source 1..22: mol_type = other RNA
ctgccttgacttgcactggatt

SEQ ID NO: 6615 - RNA, 22 nt, synthetic construct
  source 1..22: mol_type = other RNA
ctgcctttgagtctgatttggg

SEQ ID NO: 6616 - RNA, 22 nt, synthetic construct
  source 1..22: mol_type = other RNA
ctggaggcactgccttgacttg

SEQ ID NO: 6617 - RNA, 22 nt, synthetic construct
  source 1..22: mol_type = other RNA
ctggattggttaccccagctaa

SEQ ID NO: 6618 - RNA, 22 nt, synthetic construct
  source 1..22: mol_type = other RNA
ctgggccgggctatgcctccca

SEQ ID NO: 6619 - RNA, 22 nt, synthetic construct
  source 1..22: mol_type = other RNA
ctggggtaaccaatccagtgca

SEQ ID NO: 6620 - RNA, 22 nt, synthetic construct
  source 1..22: mol_type = other RNA
ctggtgggagaagcttagttct

SEQ ID NO: 6621 - RNA, 22 nt, synthetic construct
  source 1..22: mol_type = other RNA
ctgtgcctctcccatcagactc

SEQ ID NO: 6622 - RNA, 22 nt, synthetic construct
  source 1..22: mol_type = other RNA
cttagttctgcctttgagtctg

SEQ ID NO: 6623 - RNA, 22 nt, synthetic construct
  source 1..22: mol_type = other RNA
cttcacgcttccctagagaggg

SEQ ID NO: 6624 - RNA, 22 nt, synthetic construct
  source 1..22: mol_type = other RNA
cttccctagagagggctgtgcc

SEQ ID NO: 6625 - RNA, 22 nt, synthetic construct
  source 1..22: mol_type = other RNA
cttctcccaccagactactcag

SEQ ID NO: 6626 - RNA, 22 nt, synthetic construct
  source 1..22: mol_type = other RNA
cttgacttgcactggattggtt

SEQ ID NO: 6627 - RNA, 22 nt, synthetic construct
  source 1..22: mol_type = other RNA
cttgcactggattggttacccc

SEQ ID NO: 6628 - RNA, 22 nt, synthetic construct
  source 1..22: mol_type = other RNA
ctttgagtctgatttgggaggc

SEQ ID NO: 6629 - RNA, 22 nt, synthetic construct
  source 1..22: mol_type = other RNA
cttttcctgagtagtctggtgg

SEQ ID NO: 6630 - RNA, 22 nt, synthetic construct
  source 1..22: mol_type = other RNA
gaaattagctggggtaaccaat

SEQ ID NO: 6631 - RNA, 22 nt, synthetic construct
  source 1..22: mol_type = other RNA
gaactaagcttctcccaccaga

SEQ ID NO: 6632 - RNA, 22 nt, synthetic construct
  source 1..22: mol_type = other RNA
gaagcgtgaagctggaggcact

SEQ ID NO: 6633 - RNA, 22 nt, synthetic construct
  source 1..22: mol_type = other RNA
gaagctggaggcactgccttga

SEQ ID NO: 6634 - RNA, 22 nt, synthetic construct
  source 1..22: mol_type = other RNA
gaagcttagttctgcctttgag

SEQ ID NO: 6635 - RNA, 22 nt, synthetic construct
  source 1..22: mol_type = other RNA
gacatagtggaaattagctggg

SEQ ID NO: 6636 - RNA, 22 nt, synthetic construct
  source 1..22: mol_type = other RNA
gactactcaggaaaaggcctgc

SEQ ID NO: 6637 - RNA, 22 nt, synthetic construct
  source 1..22: mol_type = other RNA
gactcaaaggcagaactaagct

SEQ ID NO: 6638 - RNA, 22 nt, synthetic construct
  source 1..22: mol_type = other RNA
gactctcctgggccgggctatg

SEQ ID NO: 6639 - RNA, 22 nt, synthetic construct
  source 1..22: mol_type = other RNA
gacttgcactggattggttacc

SEQ ID NO: 6640 - RNA, 22 nt, synthetic construct
  source 1..22: mol_type = other RNA
gagaagcttagttctgcctttg

SEQ ID NO: 6641 - RNA, 22 nt, synthetic construct
  source 1..22: mol_type = other RNA
gagaggcacagccctctctagg

SEQ ID NO: 6642 - RNA, 22 nt, synthetic construct
  source 1..22: mol_type = other RNA
gagagggctgtgcctctcccat

SEQ ID NO: 6643 - RNA, 22 nt, synthetic construct
  source 1..22: mol_type = other RNA
gagagtctgatgggagaggcac

SEQ ID NO: 6644 - RNA, 22 nt, synthetic construct
  source 1..22: mol_type = other RNA
gaggcacagccctctctaggga

SEQ ID NO: 6645 - RNA, 22 nt, synthetic construct
  source 1..22: mol_type = other RNA
gaggcactgccttgacttgcac

SEQ ID NO: 6646 - RNA, 22 nt, synthetic construct
  source 1..22: mol_type = other RNA
gaggcaggccttttcctgagta

SEQ ID NO: 6647 - RNA, 22 nt, synthetic construct
  source 1..22: mol_type = other RNA
gaggcatagcccggcccaggag

SEQ ID NO: 6648 - RNA, 22 nt, synthetic construct
  source 1..22: mol_type = other RNA
gagggctgtgcctctcccatca

SEQ ID NO: 6649 - RNA, 22 nt, synthetic construct
  source 1..22: mol_type = other RNA
gagggggccaagggacatagtg

SEQ ID NO: 6650 - RNA, 22 nt, synthetic construct
  source 1..22: mol_type = other RNA
gaggggggaggcaggccttttc

SEQ ID NO: 6651 - RNA, 22 nt, synthetic construct
  source 1..22: mol_type = other RNA
gagtagtctggtgggagaagct

SEQ ID NO: 6652 - RNA, 22 nt, synthetic construct
  source 1..22: mol_type = other RNA
gagtctgatgggagaggcacag

SEQ ID NO: 6653 - RNA, 22 nt, synthetic construct
  source 1..22: mol_type = other RNA
gagtctgatttgggaggcatag

SEQ ID NO: 6654 - RNA, 22 nt, synthetic construct
  source 1..22: mol_type = other RNA
gatgggagaggcacagccctct

SEQ ID NO: 6655 - RNA, 22 nt, synthetic construct
  source 1..22: mol_type = other RNA
gattggttaccccagctaattt

SEQ ID NO: 6656 - RNA, 22 nt, synthetic construct
  source 1..22: mol_type = other RNA
gatttgggaggcatagcccggc

SEQ ID NO: 6657 - RNA, 22 nt, synthetic construct
  source 1..22: mol_type = other RNA
gcaagtcaaggcagtgcctcca

SEQ ID NO: 6658 - RNA, 22 nt, synthetic construct
  source 1..22: mol_type = other RNA
gcaagtgcagagggggccaagg

SEQ ID NO: 6659 - RNA, 22 nt, synthetic construct
  source 1..22: mol_type = other RNA
gcacagccctctctagggaagc

SEQ ID NO: 6660 - RNA, 22 nt, synthetic construct
  source 1..22: mol_type = other RNA
gcactgccttgacttgcactgg

SEQ ID NO: 6661 - RNA, 22 nt, synthetic construct
  source 1..22: mol_type = other RNA
gcactggattggttaccccagc

SEQ ID NO: 6662 - RNA, 22 nt, synthetic construct
  source 1..22: mol_type = other RNA
gcagaactaagcttctcccacc

SEQ ID NO: 6663 - RNA, 22 nt, synthetic construct
  source 1..22: mol_type = other RNA
gcagagggggccaagggacata

SEQ ID NO: 6664 - RNA, 22 nt, synthetic construct
  source 1..22: mol_type = other RNA
gcaggccttttcctgagtagtc

SEQ ID NO: 6665 - RNA, 22 nt, synthetic construct
  source 1..22: mol_type = other RNA
gcagtgcctccagcttcacgct

SEQ ID NO: 6666 - RNA, 22 nt, synthetic construct
  source 1..22: mol_type = other RNA
gcatagcccggcccaggagagt

SEQ ID NO: 6667 - RNA, 22 nt, synthetic construct
  source 1..22: mol_type = other RNA
gccaagggacatagtggaaatt

SEQ ID NO: 6668 - RNA, 22 nt, synthetic construct
  source 1..22: mol_type = other RNA
gcccaggagagtctgatgggag

SEQ ID NO: 6669 - RNA, 22 nt, synthetic construct
  source 1..22: mol_type = other RNA
gcccggcccaggagagtctgat

SEQ ID NO: 6670 - RNA, 22 nt, synthetic construct
  source 1..22: mol_type = other RNA
gccctctctagggaagcgtgaa

SEQ ID NO: 6671 - RNA, 22 nt, synthetic construct
  source 1..22: mol_type = other RNA
gccgggctatgcctcccaaatc

SEQ ID NO: 6672 - RNA, 22 nt, synthetic construct
  source 1..22: mol_type = other RNA
gcctccagcttcacgcttccct

SEQ ID NO: 6673 - RNA, 22 nt, synthetic construct
  source 1..22: mol_type = other RNA
gcctcccaaatcagactcaaag

SEQ ID NO: 6674 - RNA, 22 nt, synthetic construct
  source 1..22: mol_type = other RNA
gcctctcccatcagactctcct

SEQ ID NO: 6675 - RNA, 22 nt, synthetic construct
  source 1..22: mol_type = other RNA
gccttgacttgcactggattgg

SEQ ID NO: 6676 - RNA, 22 nt, synthetic construct
  source 1..22: mol_type = other RNA
gcctttgagtctgatttgggag

SEQ ID NO: 6677 - RNA, 22 nt, synthetic construct
  source 1..22: mol_type = other RNA
gccttttcctgagtagtctggt

SEQ ID NO: 6678 - RNA, 22 nt, synthetic construct
  source 1..22: mol_type = other RNA
gcgtgaagctggaggcactgcc

SEQ ID NO: 6679 - RNA, 22 nt, synthetic construct
  source 1..22: mol_type = other RNA
gctaatttccactatgtccctt

SEQ ID NO: 6680 - RNA, 22 nt, synthetic construct
  source 1..22: mol_type = other RNA
gctatgcctcccaaatcagact

SEQ ID NO: 6681 - RNA, 22 nt, synthetic construct
  source 1..22: mol_type = other RNA
gctggaggcactgccttgactt

SEQ ID NO: 6682 - RNA, 22 nt, synthetic construct
  source 1..22: mol_type = other RNA
gctggggtaaccaatccagtgc

SEQ ID NO: 6683 - RNA, 22 nt, synthetic construct
  source 1..22: mol_type = other RNA
gctgtgcctctcccatcagact

SEQ ID NO: 6684 - RNA, 22 nt, synthetic construct
  source 1..22: mol_type = other RNA
gcttagttctgcctttgagtct

SEQ ID NO: 6685 - RNA, 22 nt, synthetic construct
  source 1..22: mol_type = other RNA
gcttcacgcttccctagagagg

SEQ ID NO: 6686 - RNA, 22 nt, synthetic construct
  source 1..22: mol_type = other RNA
gcttccctagagagggctgtgc

SEQ ID NO: 6687 - RNA, 22 nt, synthetic construct
  source 1..22: mol_type = other RNA
gcttctcccaccagactactca

SEQ ID NO: 6688 - RNA, 22 nt, synthetic construct
  source 1..22: mol_type = other RNA
ggaaattagctggggtaaccaa

SEQ ID NO: 6689 - RNA, 22 nt, synthetic construct
  source 1..22: mol_type = other RNA
ggaagcgtgaagctggaggcac

SEQ ID NO: 6690 - RNA, 22 nt, synthetic construct
  source 1..22: mol_type = other RNA
ggacatagtggaaattagctgg

SEQ ID NO: 6691 - RNA, 22 nt, synthetic construct
  source 1..22: mol_type = other RNA
ggagaagcttagttctgccttt

SEQ ID NO: 6692 - RNA, 22 nt, synthetic construct
  source 1..22: mol_type = other RNA
ggagaggcacagccctctctag

SEQ ID NO: 6693 - RNA, 22 nt, synthetic construct
  source 1..22: mol_type = other RNA
ggagagtctgatgggagaggca

SEQ ID NO: 6694 - RNA, 22 nt, synthetic construct
  source 1..22: mol_type = other RNA
ggaggcactgccttgacttgca

SEQ ID NO: 6695 - RNA, 22 nt, synthetic construct
  source 1..22: mol_type = other RNA
ggaggcaggccttttcctgagt

SEQ ID NO: 6696 - RNA, 22 nt, synthetic construct
  source 1..22: mol_type = other RNA
ggaggcatagcccggcccagga

SEQ ID NO: 6697 - RNA, 22 nt, synthetic construct
  source 1..22: mol_type = other RNA
ggattggttaccccagctaatt

SEQ ID NO: 6698 - RNA, 22 nt, synthetic construct
  source 1..22: mol_type = other RNA
ggcaagtgcagagggggccaag

SEQ ID NO: 6699 - RNA, 22 nt, synthetic construct
  source 1..22: mol_type = other RNA
ggcacagccctctctagggaag

SEQ ID NO: 6700 - RNA, 22 nt, synthetic construct
  source 1..22: mol_type = other RNA
ggcactgccttgacttgcactg

SEQ ID NO: 6701 - RNA, 22 nt, synthetic construct
  source 1..22: mol_type = other RNA
ggcagaactaagcttctcccac

SEQ ID NO: 6702 - RNA, 22 nt, synthetic construct
  source 1..22: mol_type = other RNA
ggcaggccttttcctgagtagt

SEQ ID NO: 6703 - RNA, 22 nt, synthetic construct
  source 1..22: mol_type = other RNA
ggcagtgcctccagcttcacgc

SEQ ID NO: 6704 - RNA, 22 nt, synthetic construct
  source 1..22: mol_type = other RNA
ggcatagcccggcccaggagag

SEQ ID NO: 6705 - RNA, 22 nt, synthetic construct
  source 1..22: mol_type = other RNA
ggccaagggacatagtggaaat

SEQ ID NO: 6706 - RNA, 22 nt, synthetic construct
  source 1..22: mol_type = other RNA
ggcccaggagagtctgatggga

SEQ ID NO: 6707 - RNA, 22 nt, synthetic construct
  source 1..22: mol_type = other RNA
ggccgggctatgcctcccaaat

SEQ ID NO: 6708 - RNA, 22 nt, synthetic construct
  source 1..22: mol_type = other RNA
ggccttttcctgagtagtctgg

SEQ ID NO: 6709 - RNA, 22 nt, synthetic construct
  source 1..22: mol_type = other RNA
ggctatgcctcccaaatcagac

SEQ ID NO: 6710 - RNA, 22 nt, synthetic construct
  source 1..22: mol_type = other RNA
ggctgtgcctctcccatcagac

SEQ ID NO: 6711 - RNA, 22 nt, synthetic construct
  source 1..22: mol_type = other RNA
gggaagcgtgaagctggaggca

SEQ ID NO: 6712 - RNA, 22 nt, synthetic construct
  source 1..22: mol_type = other RNA
gggacatagtggaaattagctg

SEQ ID NO: 6713 - RNA, 22 nt, synthetic construct
  source 1..22: mol_type = other RNA
gggagaagcttagttctgcctt

SEQ ID NO: 6714 - RNA, 22 nt, synthetic construct
  source 1..22: mol_type = other RNA
gggagaggcacagccctctcta

SEQ ID NO: 6715 - RNA, 22 nt, synthetic construct
  source 1..22: mol_type = other RNA
gggaggcaggccttttcctgag

SEQ ID NO: 6716 - RNA, 22 nt, synthetic construct
  source 1..22: mol_type = other RNA
gggaggcatagcccggcccagg

SEQ ID NO: 6717 - RNA, 22 nt, synthetic construct
  source 1..22: mol_type = other RNA
gggccaagggacatagtggaaa

SEQ ID NO: 6718 - RNA, 22 nt, synthetic construct
  source 1..22: mol_type = other RNA
gggccgggctatgcctcccaaa

SEQ ID NO: 6719 - RNA, 22 nt, synthetic construct
  source 1..22: mol_type = other RNA
gggctatgcctcccaaatcaga

SEQ ID NO: 6720 - RNA, 22 nt, synthetic construct
  source 1..22: mol_type = other RNA
gggctgtgcctctcccatcaga

SEQ ID NO: 6721 - RNA, 22 nt, synthetic construct
  source 1..22: mol_type = other RNA
ggggaggcaggccttttcctga

SEQ ID NO: 6722 - RNA, 22 nt, synthetic construct
  source 1..22: mol_type = other RNA
ggggccaagggacatagtggaa

SEQ ID NO: 6723 - RNA, 22 nt, synthetic construct
  source 1..22: mol_type = other RNA
gggggaggcaggccttttcctg

SEQ ID NO: 6724 - RNA, 22 nt, synthetic construct
  source 1..22: mol_type = other RNA
gggggccaagggacatagtgga

SEQ ID NO: 6725 - RNA, 22 nt, synthetic construct
  source 1..22: mol_type = other RNA
ggggggaggcaggccttttcct

SEQ ID NO: 6726 - RNA, 22 nt, synthetic construct
  source 1..22: mol_type = other RNA
ggggtaaccaatccagtgcaag

SEQ ID NO: 6727 - RNA, 22 nt, synthetic construct
  source 1..22: mol_type = other RNA
gggtaaccaatccagtgcaagt

SEQ ID NO: 6728 - RNA, 22 nt, synthetic construct
  source 1..22: mol_type = other RNA
ggtaaccaatccagtgcaagtc

SEQ ID NO: 6729 - RNA, 22 nt, synthetic construct
  source 1..22: mol_type = other RNA
ggtgggagaagcttagttctgc

SEQ ID NO: 6730 - RNA, 22 nt, synthetic construct
  source 1..22: mol_type = other RNA
ggttaccccagctaatttccac

SEQ ID NO: 6731 - RNA, 22 nt, synthetic construct
  source 1..22: mol_type = other RNA
gtaaccaatccagtgcaagtca

SEQ ID NO: 6732 - RNA, 22 nt, synthetic construct
  source 1..22: mol_type = other RNA
gtagtctggtgggagaagctta

SEQ ID NO: 6733 - RNA, 22 nt, synthetic construct
  source 1..22: mol_type = other RNA
gtcaaggcagtgcctccagctt

SEQ ID NO: 6734 - RNA, 22 nt, synthetic construct
  source 1..22: mol_type = other RNA
gtctgaggggggaggcaggcct

SEQ ID NO: 6735 - RNA, 22 nt, synthetic construct
  source 1..22: mol_type = other RNA
gtctgatgggagaggcacagcc

SEQ ID NO: 6736 - RNA, 22 nt, synthetic construct
  source 1..22: mol_type = other RNA
gtctgatttgggaggcatagcc

SEQ ID NO: 6737 - RNA, 22 nt, synthetic construct
  source 1..22: mol_type = other RNA
gtctggtgggagaagcttagtt

SEQ ID NO: 6738 - RNA, 22 nt, synthetic construct
  source 1..22: mol_type = other RNA
gtgaagctggaggcactgcctt

SEQ ID NO: 6739 - RNA, 22 nt, synthetic construct
  source 1..22: mol_type = other RNA
gtgcaagtcaaggcagtgcctc

SEQ ID NO: 6740 - RNA, 22 nt, synthetic construct
  source 1..22: mol_type = other RNA
gtgcagagggggccaagggaca

SEQ ID NO: 6741 - RNA, 22 nt, synthetic construct
  source 1..22: mol_type = other RNA
gtgcctccagcttcacgcttcc

SEQ ID NO: 6742 - RNA, 22 nt, synthetic construct
  source 1..22: mol_type = other RNA
gtgcctctcccatcagactctc

SEQ ID NO: 6743 - RNA, 22 nt, synthetic construct
  source 1..22: mol_type = other RNA
gtggaaattagctggggtaacc

SEQ ID NO: 6744 - RNA, 22 nt, synthetic construct
  source 1..22: mol_type = other RNA
gtgggagaagcttagttctgcc

SEQ ID NO: 6745 - RNA, 22 nt, synthetic construct
  source 1..22: mol_type = other RNA
gttaccccagctaatttccact

SEQ ID NO: 6746 - RNA, 22 nt, synthetic construct
  source 1..22: mol_type = other RNA
gttctgcctttgagtctgattt

SEQ ID NO: 6747 - RNA, 22 nt, synthetic construct
  source 1..22: mol_type = other RNA
taaccaatccagtgcaagtcaa

SEQ ID NO: 6748 - RNA, 22 nt, synthetic construct
  source 1..22: mol_type = other RNA
taagcttctcccaccagactac

SEQ ID NO: 6749 - RNA, 22 nt, synthetic construct
  source 1..22: mol_type = other RNA
taatttccactatgtcccttgg

SEQ ID NO: 6750 - RNA, 22 nt, synthetic construct
  source 1..22: mol_type = other RNA
taccccagctaatttccactat

SEQ ID NO: 6751 - RNA, 22 nt, synthetic construct
  source 1..22: mol_type = other RNA
tactcaggaaaaggcctgcctc

SEQ ID NO: 6752 - RNA, 22 nt, synthetic construct
  source 1..22: mol_type = other RNA
tagagagggctgtgcctctccc

SEQ ID NO: 6753 - RNA, 22 nt, synthetic construct
  source 1..22: mol_type = other RNA
tagcccggcccaggagagtctg

SEQ ID NO: 6754 - RNA, 22 nt, synthetic construct
  source 1..22: mol_type = other RNA
tagctggggtaaccaatccagt

SEQ ID NO: 6755 - RNA, 22 nt, synthetic construct
  source 1..22: mol_type = other RNA
tagggaagcgtgaagctggagg

SEQ ID NO: 6756 - RNA, 22 nt, synthetic construct
  source 1..22: mol_type = other RNA
tagtctggtgggagaagcttag

SEQ ID NO: 6757 - RNA, 22 nt, synthetic construct
  source 1..22: mol_type = other RNA
tagtggaaattagctggggtaa

SEQ ID NO: 6758 - RNA, 22 nt, synthetic construct
  source 1..22: mol_type = other RNA
tagttctgcctttgagtctgat

SEQ ID NO: 6759 - RNA, 22 nt, synthetic construct
  source 1..22: mol_type = other RNA
tatgcctcccaaatcagactca

SEQ ID NO: 6760 - RNA, 22 nt, synthetic construct
  source 1..22: mol_type = other RNA
tatgtcccttggccccctctgc

SEQ ID NO: 6761 - RNA, 22 nt, synthetic construct
  source 1..22: mol_type = other RNA
tcaaaggcagaactaagcttct

SEQ ID NO: 6762 - RNA, 22 nt, synthetic construct
  source 1..22: mol_type = other RNA
tcaaggcagtgcctccagcttc

SEQ ID NO: 6763 - RNA, 22 nt, synthetic construct
  source 1..22: mol_type = other RNA
tcacgcttccctagagagggct

SEQ ID NO: 6764 - RNA, 22 nt, synthetic construct
  source 1..22: mol_type = other RNA
tcagactcaaaggcagaactaa

SEQ ID NO: 6765 - RNA, 22 nt, synthetic construct
  source 1..22: mol_type = other RNA
tcagactctcctgggccgggct

SEQ ID NO: 6766 - RNA, 22 nt, synthetic construct
  source 1..22: mol_type = other RNA
tcaggaaaaggcctgcctcccc

SEQ ID NO: 6767 - RNA, 22 nt, synthetic construct
  source 1..22: mol_type = other RNA
tccactatgtcccttggccccc

SEQ ID NO: 6768 - RNA, 22 nt, synthetic construct
  source 1..22: mol_type = other RNA
tccagcttcacgcttccctaga

SEQ ID NO: 6769 - RNA, 22 nt, synthetic construct
  source 1..22: mol_type = other RNA
tccagtgcaagtcaaggcagtg

SEQ ID NO: 6770 - RNA, 22 nt, synthetic construct
  source 1..22: mol_type = other RNA
tcccaaatcagactcaaaggca

SEQ ID NO: 6771 - RNA, 22 nt, synthetic construct
  source 1..22: mol_type = other RNA
tcccaccagactactcaggaaa

SEQ ID NO: 6772 - RNA, 22 nt, synthetic construct
  source 1..22: mol_type = other RNA
tcccatcagactctcctgggcc

SEQ ID NO: 6773 - RNA, 22 nt, synthetic construct
  source 1..22: mol_type = other RNA
tccctagagagggctgtgcctc

SEQ ID NO: 6774 - RNA, 22 nt, synthetic construct
  source 1..22: mol_type = other RNA
tcctgagtagtctggtgggaga

SEQ ID NO: 6775 - RNA, 22 nt, synthetic construct
  source 1..22: mol_type = other RNA
tcctgggccgggctatgcctcc

SEQ ID NO: 6776 - RNA, 22 nt, synthetic construct
  source 1..22: mol_type = other RNA
tctagggaagcgtgaagctgga

SEQ ID NO: 6777 - RNA, 22 nt, synthetic construct
  source 1..22: mol_type = other RNA
tctcccaccagactactcagga

SEQ ID NO: 6778 - RNA, 22 nt, synthetic construct
  source 1..22: mol_type = other RNA
tctcccatcagactctcctggg

SEQ ID NO: 6779 - RNA, 22 nt, synthetic construct
  source 1..22: mol_type = other RNA
tctcctgggccgggctatgcct

SEQ ID NO: 6780 - RNA, 22 nt, synthetic construct
  source 1..22: mol_type = other RNA
tctctagggaagcgtgaagctg

SEQ ID NO: 6781 - RNA, 22 nt, synthetic construct
  source 1..22: mol_type = other RNA
tctgaggggggaggcaggcctt

SEQ ID NO: 6782 - RNA, 22 nt, synthetic construct
  source 1..22: mol_type = other RNA
tctgatgggagaggcacagccc

SEQ ID NO: 6783 - RNA, 22 nt, synthetic construct
  source 1..22: mol_type = other RNA
tctgatttgggaggcatagccc

SEQ ID NO: 6784 - RNA, 22 nt, synthetic construct
  source 1..22: mol_type = other RNA
tctgcctttgagtctgatttgg

SEQ ID NO: 6785 - RNA, 22 nt, synthetic construct
  source 1..22: mol_type = other RNA
tctggtgggagaagcttagttc

SEQ ID NO: 6786 - RNA, 22 nt, synthetic construct
  source 1..22: mol_type = other RNA
tgaagctggaggcactgccttg

SEQ ID NO: 6787 - RNA, 22 nt, synthetic construct
  source 1..22: mol_type = other RNA
tgacttgcactggattggttac

SEQ ID NO: 6788 - RNA, 22 nt, synthetic construct
  source 1..22: mol_type = other RNA
tgaggggggaggcaggcctttt

SEQ ID NO: 6789 - RNA, 22 nt, synthetic construct
  source 1..22: mol_type = other RNA
tgagtagtctggtgggagaagc

SEQ ID NO: 6790 - RNA, 22 nt, synthetic construct
  source 1..22: mol_type = other RNA
tgagtctgatttgggaggcata

SEQ ID NO: 6791 - RNA, 22 nt, synthetic construct
  source 1..22: mol_type = other RNA
tgatgggagaggcacagccctc

SEQ ID NO: 6792 - RNA, 22 nt, synthetic construct
  source 1..22: mol_type = other RNA
tgatttgggaggcatagcccgg

SEQ ID NO: 6793 - RNA, 22 nt, synthetic construct
  source 1..22: mol_type = other RNA
tgcaagtcaaggcagtgcctcc

SEQ ID NO: 6794 - RNA, 22 nt, synthetic construct
  source 1..22: mol_type = other RNA
tgcactggattggttaccccag

SEQ ID NO: 6795 - RNA, 22 nt, synthetic construct
  source 1..22: mol_type = other RNA
tgcagagggggccaagggacat

SEQ ID NO: 6796 - RNA, 22 nt, synthetic construct
  source 1..22: mol_type = other RNA
tgcctccagcttcacgcttccc

SEQ ID NO: 6797 - RNA, 22 nt, synthetic construct
  source 1..22: mol_type = other RNA
tgcctcccaaatcagactcaaa

SEQ ID NO: 6798 - RNA, 22 nt, synthetic construct
  source 1..22: mol_type = other RNA
tgcctctcccatcagactctcc

SEQ ID NO: 6799 - RNA, 22 nt, synthetic construct
  source 1..22: mol_type = other RNA
tgccttgacttgcactggattg

SEQ ID NO: 6800 - RNA, 22 nt, synthetic construct
  source 1..22: mol_type = other RNA
tgcctttgagtctgatttggga

SEQ ID NO: 6801 - RNA, 22 nt, synthetic construct
  source 1..22: mol_type = other RNA
tggaaattagctggggtaacca

SEQ ID NO: 6802 - RNA, 22 nt, synthetic construct
  source 1..22: mol_type = other RNA
tggaggcactgccttgacttgc

SEQ ID NO: 6803 - RNA, 22 nt, synthetic construct
  source 1..22: mol_type = other RNA
tggattggttaccccagctaat

SEQ ID NO: 6804 - RNA, 22 nt, synthetic construct
  source 1..22: mol_type = other RNA
tgggagaagcttagttctgcct

SEQ ID NO: 6805 - RNA, 22 nt, synthetic construct
  source 1..22: mol_type = other RNA
tgggagaggcacagccctctct

SEQ ID NO: 6806 - RNA, 22 nt, synthetic construct
  source 1..22: mol_type = other RNA
tgggaggcatagcccggcccag

SEQ ID NO: 6807 - RNA, 22 nt, synthetic construct
  source 1..22: mol_type = other RNA
tgggccgggctatgcctcccaa

SEQ ID NO: 6808 - RNA, 22 nt, synthetic construct
  source 1..22: mol_type = other RNA
tggggtaaccaatccagtgcaa

SEQ ID NO: 6809 - RNA, 22 nt, synthetic construct
  source 1..22: mol_type = other RNA
tggtgggagaagcttagttctg

SEQ ID NO: 6810 - RNA, 22 nt, synthetic construct
  source 1..22: mol_type = other RNA
tggttaccccagctaatttcca

SEQ ID NO: 6811 - RNA, 22 nt, synthetic construct
  source 1..22: mol_type = other RNA
tgtgcctctcccatcagactct

SEQ ID NO: 6812 - RNA, 22 nt, synthetic construct
  source 1..22: mol_type = other RNA
ttaccccagctaatttccacta

SEQ ID NO: 6813 - RNA, 22 nt, synthetic construct
  source 1..22: mol_type = other RNA
ttagctggggtaaccaatccag

SEQ ID NO: 6814 - RNA, 22 nt, synthetic construct
  source 1..22: mol_type = other RNA
ttagttctgcctttgagtctga

SEQ ID NO: 6815 - RNA, 22 nt, synthetic construct
  source 1..22: mol_type = other RNA
ttcacgcttccctagagagggc

SEQ ID NO: 6816 - RNA, 22 nt, synthetic construct
  source 1..22: mol_type = other RNA
ttccactatgtcccttggcccc

SEQ ID NO: 6817 - RNA, 22 nt, synthetic construct
  source 1..22: mol_type = other RNA
ttccctagagagggctgtgcct

SEQ ID NO: 6818 - RNA, 22 nt, synthetic construct
  source 1..22: mol_type = other RNA
ttcctgagtagtctggtgggag

SEQ ID NO: 6819 - RNA, 22 nt, synthetic construct
  source 1..22: mol_type = other RNA
ttctcccaccagactactcagg

SEQ ID NO: 6820 - RNA, 22 nt, synthetic construct
  source 1..22: mol_type = other RNA
ttctgcctttgagtctgatttg

SEQ ID NO: 6821 - RNA, 22 nt, synthetic construct
  source 1..22: mol_type = other RNA
ttgacttgcactggattggtta

SEQ ID NO: 6822 - RNA, 22 nt, synthetic construct
  source 1..22: mol_type = other RNA
ttgagtctgatttgggaggcat

SEQ ID NO: 6823 - RNA, 22 nt, synthetic construct
  source 1..22: mol_type = other RNA
ttgcactggattggttacccca

SEQ ID NO: 6824 - RNA, 22 nt, synthetic construct
  source 1..22: mol_type = other RNA
ttgggaggcatagcccggccca

SEQ ID NO: 6825 - RNA, 22 nt, synthetic construct
  source 1..22: mol_type = other RNA
ttggttaccccagctaatttcc

SEQ ID NO: 6826 - RNA, 22 nt, synthetic construct
  source 1..22: mol_type = other RNA
tttccactatgtcccttggccc

SEQ ID NO: 6827 - RNA, 22 nt, synthetic construct
  source 1..22: mol_type = other RNA
tttcctgagtagtctggtggga

SEQ ID NO: 6828 - RNA, 22 nt, synthetic construct
  source 1..22: mol_type = other RNA
tttgagtctgatttgggaggca

SEQ ID NO: 6829 - RNA, 22 nt, synthetic construct
  source 1..22: mol_type = other RNA
tttgggaggcatagcccggccc

SEQ ID NO: 6830 - RNA, 22 nt, synthetic construct
  source 1..22: mol_type = other RNA
ttttcctgagtagtctggtggg

SEQ ID NO: 6831 - RNA, 22 nt, synthetic construct
  source 1..22: mol_type = other RNA
ctcgccctcgcaggcggtccgc

SEQ ID NO: 6832 - RNA, 22 nt, synthetic construct
  source 1..22: mol_type = other RNA
cggggcgcgcgggcgcaggaca

SEQ ID NO: 6833 - RNA, 22 nt, synthetic construct
  source 1..22: mol_type = other RNA
gggagggcttgacgggccagag

SEQ ID NO: 6834 - RNA, 20 nt, synthetic construct
  source 1..20: mol_type = other RNA
aaaaaaatgtacttggttcc

SEQ ID NO: 6835 - RNA, 17 nt, synthetic construct
  source 1..17: mol_type = other RNA
aaaatgtacttggttcc

SEQ ID NO: 6836 - RNA, 17 nt, synthetic construct
  source 1..17: mol_type = other RNA
aaaaatgtacttggttc

SEQ ID NO: 6837 - RNA, 17 nt, synthetic construct
  source 1..17: mol_type = other RNA
aaaaaatgtacttggtt

SEQ ID NO: 6838 - RNA, 17 nt, synthetic construct
  source 1..17: mol_type = other RNA
aaaaaaatgtacttggt

SEQ ID NO: 6839 - protein, 1348 aa, synthetic construct
MSIKSDYFLGLDIGTDSIGWAVTDPEYHILRRKGKALWGIRLFDAANTAAERRTFRTSRRRIQRRRQRIRLLQELFAEEMVKLDPGFFQRLSDSAFWQEDKQEQQIYSLFTCENYTDVDYYREYPTIYHLRSALIQEKKEFDLRLLYLALHHLMKHRGHFLFNGSINNVTSFHTTFQTFADCLYDEFDIELECDSEDRFAEILKDKHARKTGKCSELEIICHIEKSNKQLKELFKLITGMKASLSVVFGDDELAEIEHNKISFSESSYDEVRLALEDEIQERTGILDIFHAVYSWAILADILEGGEYEGNSYLSVAKVSTYKKHGDDLRLLRTLVREYCPDHYKSFFSVSGKENYCAYAGTLKKNGKKQPIKRCSQEDFYKALKKLLNQMPTEQPEVKDIFIEIENGTFLPLQVSKDNGVIPYQVNKMELEKILQNAEEYLPFLKNIDEECGKTVSKKIIDLFEFRIPYYVGPLNTAKGENCWMVRKEAGRIYPWNFDEKVDRDQSAEKFIRRMTNQCTYLIHEDVVPKNSLLYSEFMVLNELNNVKIRSEKLPVELKQAIVLDLFKKQKQITGKKLLNYLNANGYDVKKEDLSGFDGNFKSSLSSYLTLKKVFGEELDKYSVQQMAEDIILWITLYGDDQKMLRRVIRKHYEQQLSEEQILSLSKLKFQGWGRLSRRLLSEMEGVDCETGECMTVMQGLRNTQNNLMQLLSQQFSFMELIEEENGNYYVDEITYDNLVKDMVISPSVKRAVWQTVQIVEEIKGVMGCQPKKIFVEMARSDEEKKRTVSRKDRLLEAYDAIKDEARQWQEELQKYSDGDFKAIKLYLYYTQMGQCMYTGRKIDLSQLNDATVWDRDHIYPQSKTKDDSLDNLVLVDRSVNAKKSDGMLSPEIQQRMRATWKYLKEKKLISEKKYERLTRVSPLTDEELAGFINRQLVETRQSSKAVATLLKRVYDEAEIVYVKAEAVSNFRRDNLDYIKVRDLNDYHHAKDAYQNIVVGNVFHEKFTSNPLRWLKNNPNTKYSLNQMFNFDLEKNGVVIWKRGKAGSIKCVEETLKRNDILFTRYAFCNKGGFFNQMLTAAPEDKTKAKGLVPIKKGMETWKYGGYTSVTPSHFMLVASKDKKGKEIRTIETVPLYRWKEFKENPDALLQYCREFYGLKEPKVLIPCIKKNARLVVNGFPMHLKGSTGKQLILQGAVQLCLNNENIKYLKKVTKYLEYNAQRRDKRTLLEVREVTGINKEENIQLYDVFVDKLSNTIYQYRPANPKDNLIKGREKFIELGLAEQCVVLGEVLHLFQCKPLTSDLTLIGGSPNTGTIKITKTISNCNVVKLLSQSIAGVKVREINLLII

SEQ ID NO: 6840 - DNA, 4047 bp, synthetic construct
  source 1..4047: mol_type = other DNA
atgagcataaaaagtgattattttttaggacttgatattggtacggattctattggatgggcggtaaccgacccagaatatcacatattgagacgaaaaggtaaagcattatggggaataagattatttgatgcggccaatacagcggcagaacggcgaacatttaggacaagccgaagaaggattcagagaagacgacagagaattcggttattgcaagaattatttgcagaagaaatggtaaaattagacccaggattttttcagaggttgtcagacagcgcattttggcaggaggataagcaagagcagcaaatttattcactttttacttgtgaaaattatacagatgttgattattacagagaatatcctactatttatcatttgagaagtgcattgattcaggaaaagaaggaatttgatcttcgtcttctatatcttgctcttcaccatttgatgaagcacaggggacatttcctgtttaatgggagtattaataatgtgacgtcatttcatacgacgtttcagacgtttgcagattgtctttatgatgagtttgatatagaactggaatgtgattccgaagatagatttgcagaaattttaaaggataaacatgccagaaaaacaggaaaatgttctgaattagagataatctgtcatatagaaaaatcaaataagcagctaaaagaactttttaaattaattacaggaatgaaagctagtttgagtgttgtgtttggtgatgatgagttagcggaaatagaacataataagattagtttttcagagagtagttatgatgaagtacgtcttgcattggaggatgagattcaggagaggactggtatactggatatctttcatgcagtttatagttgggcgattctcgcggatattttagaaggcggagaatatgaggggaattcttatctaagcgttgcgaaggtaagcacttataaaaagcatggtgatgatttgcggttgctaagaacactggttcgggaatattgtcctgatcattacaaatctttcttttccgtatcagggaaggagaattattgtgcatatgcgggtactttaaaaaagaatggaaaaaaacagccgattaaacgttgcagccaggaagatttttataaagcgttaaagaaattgctgaatcagatgccgacagaacaaccagaagtgaaagacatcttcatcgaaattgaaaatggtacttttttgccgttgcaggtaagtaaggataatggagtgataccttatcaggtaaataagatggaattagaaaaaatcctgcagaatgcagaggaatatttgccatttctaaaaaatatagatgaagaatgtggaaaaacggttagtaagaagattatagatctctttgagtttagaataccatattatgtagggccgcttaataccgctaaaggagaaaactgttggatggtcagaaaagaagcggggagaatatatccgtggaattttgatgaaaaggtagacagagatcaatcagcagaaaaatttatccgtagaatgacgaatcagtgtacatatttaatacatgaggatgttgtacctaaaaattctttgctttattcggagtttatggtgcttaatgaattaaataatgtaaagatccggtctgagaagctgccggtggagttaaaacaggcaatagtattggatttgtttaagaaacaaaagcagataacaggaaaaaaacttcttaattacttgaatgcaaatggatatgatgtaaaaaaagaagatttgtcagggtttgacggaaactttaaatcatctctgtcatcatatcttactttgaaaaaagtatttggtgaagaattagataaatatagtgtgcagcagatggcagaggatattatcttgtggatcactctgtatggagatgatcagaagatgttgcgcagggtaattcgaaaacattatgaacagcaattgagtgaagaacagattctttccttatcgaaattgaaattccaaggctggggaagattatccagacgacttttgagtgaaatggaaggcgttgattgtgagactggtgagtgtatgacggtcatgcaaggacttcgtaatactcagaataatctgatgcagcttctaagtcagcagttttcatttatggaattgattgaggaagaaaatgggaattattatgtagatgagattacatacgataatcttgtgaaagatatggttatatctccgtcagtgaagagagcagtctggcagacagttcagattgtggaggagattaagggggtaatgggctgtcagcctaagaagatatttgtcgagatggcgcgaagcgatgaagagaaaaagcgtactgtatctaggaaagacaggttattagaagcatatgatgcgatcaaggatgaggctcgtcaatggcaggaagagttgcaaaagtattcagatggtgattttaaggctattaaactttatctgtattatacgcagatggggcaatgtatgtatactggaagaaagatagatctgtcacaattaaatgatgcgacggtatgggacagagatcatatatatccacagtccaaaacaaaagatgatagtctggataatctggtattggtagaccggagcgtgaacgctaagaaaagtgatgggatgctatcacctgagattcagcagagaatgcgggctacttggaaatacttaaaagagaaaaagttgatttcagagaagaaatatgagcgtttgactagggtctcaccacttacagatgaggaattggcaggttttattaatcgacagttagttgaaacacgtcagtcttcgaaagcagtagcaacacttttgaaacgagtatatgatgaagcggagattgtctatgtaaaagcggaagctgtttcaaattttagaagagataatttggattatattaaggtgcgtgatctgaatgattatcatcatgctaaagatgcatatcagaatattgtagtggggaatgtttttcatgagaaatttaccagcaatccgcttcgttggctgaaaaacaatcctaatacgaaatatagtttaaatcagatgtttaactttgatttagagaaaaatggggtggtaatatggaaaagggggaaggctggaagtattaaatgtgttgaagaaacattgaaaagaaatgatattctttttacacgatatgctttttgtaataaaggtggtttttttaaccagatgttaacggcagctccagaagataaaacgaaagcaaagggacttgtaccaataaaaaaaggtatggaaacatggaaatacgggggatatacatcagtaactccgtcacattttatgttggttgcttcgaaagataagaaaggaaaggagataagaacgattgagacagttccgttgtataggtggaaagagttcaaagaaaatccagatgcattactccaatattgtagagagttctatggtttgaaagagcccaaggtgttgataccatgcatcaagaagaatgccagattagtcgttaatggatttccaatgcatttgaaagggagtacaggaaaacaattgattttgcagggagcggttcaattatgtctgaataatgaaaatataaagtatttgaaaaaagtcacaaaatatttggaatataatgcacagagaagagataaaagaacactgctggaagtaagagaggttacaggaattaacaaagaggaaaatatacagttatatgatgtgtttgttgataaattgagtaacacaatatatcagtatcgtccggccaatccaaaggacaatcttataaaaggaagagagaagtttatagaattagggttggcagaacaatgtgttgtgttaggtgaagtattgcatttgttccaatgtaaaccactcacgtctgatttgactttgattggaggttcaccgaatacagggacaataaaaataacaaagacaattagtaattgtaatgttgtaaagttgttaagccaatctattgcaggtgttaaagtgagagaaattaatttgttaataatatga

SEQ ID NO: 6841 - DNA, 4044 bp, synthetic construct
  source 1..4044: mol_type = other DNA
tctatcaagagcgactacttcctgggcctcgacatcggcacagattctatcggatgggccgtgacagaccccgagtaccacatcctgagaagaaagggcaaagccctgtggggcatcagactgttcgatgccgccaatactgccgccgagagaagaaccttccggaccagcagaagaagaatccagcggcggagacagcggatcagactgctgcaagagctgttcgccgaggaaatggttaagctggaccccggcttcttccagagactgagcgatagcgccttctggcaagaggacaagcaagagcagcagatctacagcctgtttacctgcgagaactacaccgacgtggactactacagagagtaccccaccatctaccacctgagaagcgccctgatccaagagaaaaaagagttcgacctgcggctgctgtatctggccctgcaccatctgatgaagcaccggggccactttctgttcaacggcagcatcaacaacgtgaccagcttccacaccaccttccagaccttcgccgactgcctgtacgacgagttcgacatcgagctggaatgcgacagcgaggacagattcgccgagatcctgaaggataagcacgccagaaagaccggcaagtgctctgagctggaaatcatctgccacatcgagaagtccaacaagcagctgaaagaactgttcaagctgatcaccggcatgaaggccagcctgagcgtggtgtttggagatgatgagctggccgagatcgagcacaacaagatcagcttcagcgagagcagctacgacgaagtgcggctggccctggaagatgagattcaagagagaaccggcatcctggacatcttccacgccgtgtattcttgggccatcctggccgatattctggaaggcggcgagtacgagggcaacagctatctgtctgtggccaaggtgtccacctacaagaagcacggcgacgacctgagactgctgagaacactcgtgcgcgagtactgccccgaccactacaagagctttttcagcgtgtccggcaaagagaactactgcgcctacgccggcacactgaagaagaacggcaagaagcagcccatcaagcggtgcagccaagaggacttctacaaggccctgaagaaactgctgaaccagatgcctaccgagcagcccgaagtgaaggatatcttcatcgagattgagaacggcaccttcctgcctctgcaagtgtccaaggacaacggcgtgatcccctaccaagtgaacaagatggaactcgagaagatcctgcagaacgccgaagagtacctgcctttcctgaagaacatcgacgaggaatgcggcaagaccgtgtccaagaagatcatcgacctgttcgagttcagaatcccctactacgtgggccctctgaataccgccaagggcgagaattgctggatggttcgaaaagaggccggcagaatctacccctggaacttcgatgagaaggtggacagagatcagagcgccgagaagttcatcagacggatgaccaaccagtgcacctacctgatccacgaggacgtggtgcctaagaacagcctgctgtactccgagttcatggtgctgaacgagctgaacaatgtgaagattcggagcgagaagctgcccgtggaactgaagcaggccatcgtgctggacctgtttaagaagcagaagcagatcacagggaagaagctgctcaactacctgaacgccaacggctacgacgtgaagaaagaggacctgagcggcttcgacggcaacttcaagtccagcctgtccagctacctgactctgaagaaggtgttcggagaggaactggacaagtacagcgtgcagcagatggccgaggacatcatcctgtggatcaccctgtatggcgacgatcagaaaatgctgcggagagtgatccggaagcactacgagcagcagctgtctgaggaacagatcctgagcctgagcaagctgaagttccaaggctggggcagactgtctagacggctgctctctgaaatggaaggcgtggactgtgaaaccggcgagtgcatgacagtgatgcagggcctgagaaacacccagaacaacctgatgcagctgctgagccagcagttcagcttcatggaactgatcgaggaagagaacgggaactactacgtcgacgagatcacctacgacaacctggtcaaggacatggtcatcagccctagcgtgaaaagggccgtgtggcagacagtgcagatcgtggaagaaatcaagggcgtgatgggatgccagcctaagaaaatcttcgtggaaatggcccgcagcgacgaagagaagaaacggaccgtgtctcggaaggatcggctgctggaagcctacgacgccatcaaggatgaggcccggcaatggcaagaagaactgcagaaatactccgacggcgatttcaaggccatcaagctgtacctgtactacacccagatgggccagtgcatgtacaccggcagaaaaatcgatctgtcccagctgaacgacgccaccgtgtgggatagagatcacatctaccctcagagcaagaccaaggacgacagcctggacaatctggtgctggtggatagatccgtgaatgccaagaaaagcgacggcatgctgagccccgagatccagcagagaatgagagccacctggaagtacctgaaagaaaagaagctcatcagcgagaagaagtacgagcggctgaccagagtgtcccctctgacagatgaagaactggccggcttcatcaaccggcagctggtggaaacaagacagagcagcaaagccgtggccacactgctgaagagggtgtacgatgaggccgagattgtgtatgtgaaggccgaggccgtgtctaacttccggcgggataacctggactacatcaaagtgcgggacctgaacgactaccaccacgccaaggacgcctaccagaacatcgtcgtgggcaacgtgttccacgagaagtttaccagcaatcccctgcggtggctgaaaaacaaccccaacaccaagtactccctcaaccagatgttcaacttcgacctggaaaagaacggcgtggtcatctggaagagaggcaaggccggctccattaagtgtgtggaagagacactgaagcggaacgacatcctgttcaccagatacgctttctgcaacaaaggcggcttctttaatcagatgctgaccgccgctccagaggataagacaaaggccaaaggcctggtgcctatcaagaaaggcatggaaacctggaaatacggcggctacaccagcgtgacccctagccactttatgctggtggccagcaaggacaagaagggaaaagagatccggaccatcgagacagtgcccctgtaccggtggaaagagttcaaagagaatcccgacgctctgctccagtactgcagagagttctacggcctgaaagagcccaaggttctgatcccttgcatcaagaagaatgcccggctggtcgtgaacggcttccctatgcacctgaagggcagcaccggaaaacagctgattctgcagggtgccgtgcagctgtgcctgaacaacgagaacatcaagtacctcaagaaagtgacgaagtacctcgagtacaacgcccagcggagagacaagagaaccctgctcgaagttcgggaagtgaccggaatcaacaaagaggaaaacatccagctgtacgatgtgttcgtggacaagctgagcaacacaatctaccagtacagacccgccaatcctaaggacaacctcatcaagggccgcgagaaattcatcgagcttggcctggctgagcagtgcgtggtgctgggagaagtgctgcatctgttccagtgcaagcccctgaccagcgatctgacactgatcggcggaagccctaacaccggcaccatcaagatcaccaagaccatcagcaactgcaacgtggtcaagctgctgtcccagtctatcgccggcgtgaaagtccgcgagatcaacctgctgatcatctga

SEQ ID NO: 6842 - RNA, 107 nt, synthetic construct
  source 1..107: mol_type = other RNA
gtttgagagtagtgtaagaaattacactacaagttcaaataaaaatttattcaaatccatttgctacattgtgtagaatttaaagatctggcaacagatcttttttt
